United States Patent Application Publication US 2020/0329713 A1 - sequence listing, part 4

SEQ ID NO: 2 - DNA, 6618583 bp, Bacillus thuringiensis (residues 1-1,654,646 of 6,618,583)
gattttgtacatgcttaaacaagcgaaaatgtacatgtttatcttgacatttacacaccgtctactaaacgtttattgagatgtaaatagattgtaaaagcttccttatcatattcccaagttccttcaatataattctttttatttggatactcacctttaccatacgtttcaaatgtcttatcaccttttaaaatgagtgacatattgaaaccgtctgttccttggaatccccaattaccgattaattccgtaccatccttcacattcttcataacgttatctgtattaattccagctttcttatctaactctttcaaatctttcattgatactgtaccgtcaccgattttaatatccccttcaagatctttgaatgccttaagccagtaaatatctccttctttcactagcttttcagatttctctattaactctttatcagtcttatcacctttttctcttttttcttttctggtgaatacttcatttattaaagaaaaagactctctaaaataactaattgctttttcaaaatctttttgttggtttacatactctgtagggggatctattgactcaaatttatctaacactttatttaattctttcacactatctactatatctgatttctttttcttaccgtcaaaaacctctcttgtaatattgttatgctccgcaaacaacttatcaaactctactcctaatttatacactttattaggatagtcttcctttgaaacgttttctttcttactattagacttcgattcttttactttagactcttccgttttctcctgtttagaagtgttcgttttctcagaaactccacaaccaaataacaacatgaccggaactgctacccctagtagtttctttgcattcatgactaatttctccttctacttgaatagattactcttactatacccatcctctttttttatcttgtaattaaagttacaatcgcaataactcctaaaattggtccccaatattccatttttataaaaaatagcgagtgttttttgttaaacataactttttcaccagtttcggtatctatataaactttcccatctggcttattaatatatttacctaaataccaagacataacccctgatataataaacattaccgccattggccaactatggtcttgaaaatatgtagcgtcccccgttatagatccaaagatagccttacccaaaagagtattaataattacaataattgcgactaaaaaaccccaaccagaccaaataatcatctatttctcctcctaaagcgtacaactttgtactttatgttaatttgaactgcaaacgaaaatgtttaaaaaaccgaatattcagacgttaataattatatttagcttacattcgattctaactttaatgtcctaaatgcaaatgaaccagatataatttgtaaaattgtcggaataagtaaaaagaataatgacataaacaacataactataggaatcacaatcatacaaactccataaactttattattaaccttgtttactaaacacgataaaatgaacaaccctatttgaaccgttaaaataatagagtaataagctaaaagttcgtaatcaaccccttccataatattaaacgctacaactattaatattatggaaataataattcccaaaatgccaccaattaaacctaatacgaattcaggtgttcttttcaattcaatcccccttttatgaaccactaacaacttgtatatttttcccattcaccatcataccaaatattcactggaaaaactatacatacttttcattcttccttaccttacagtgaccttcttaccattatagatagcttgtagcagtcacaaaatcaaaaccttcaaaattactaaccggtttcgatacttttagaaagtagacataccccttgaatacaattagtattaacacatgaaatacgaaaggcttaaaaaggctttcacatgaagaaaggaagttgcacaactatggattttaaaacagttatgcaagaacttgaatctctaggtaaggaacgaacgaaaaaaatatacatatctaacggtgcgcatgagccagtattcggagtagctacaggtgctatgaaaccaatcgctaaaaaaataaaattaaatcaagagttagctgaagagctttatgccacaggtaactacgatgctatgtactttgcaggtattattgccgatccaaaagctatgagtaagtctgattttgatcgctggatagacggggcatatttttatatgctatctgattatgtagtggcagtaactttatcggagtcaaatattgcacaagatgttgctgataaatggattgcaagtggggacgagcttaaaatgtctgccggatggagttgctactgttggcttttaggaaatcgcaaagacaatgaattttccgaaagtaaaatttccgatatgcttgaaatggtgaaagatacaattcatcattctccagaacgaacaaaatccgctatgaataatttcctaaacaccgtggcaatatcatatgtaccactacatgaaaaagcagtcgagattgcaaaagaagttggtatagttgaagtcaaacgtgataataaaaaaagcagtttgttaaatgcttctgaaagtattcagaaagaacttgatagaggaagacttggtttcaagcgtaagtatgtaaggtgttaaaagtatgaaggtgtcaatgtaggagagattgacaccttttttgtggacattactagactaacggagctgcaagttaaagggaaccaatcattcatctcccactatacatctcaaacttcttctttcaatttatataccctatctcttttctcatcatctttgataaaaataagttttccttctgtaacaaaaccttctaatagtaaacatacttgtccatatgctttaggcttattcgtagtgaatctttcatcggctattttaccagatcgtattaatcgttcacatagctcaagcgcacttatttcttcagaatcaattaattctaaaatatctttttgtaatggtgataaaggggctggtaccttacatacctcagctacctccaccttttctttttcttcttcaaataaatcttcaaatgaaatttgattcattacacctgttcctttctaacaattgatttatataacatgaattgaattctataggtacgaaaactttaaatattagtcattgttatgtagtgcttacctcgttacatgaatttcaaactcatgtacatcatttcatatagtatattttgattataccaaatatacgttctgtcttctattgtagaatttttataacagaaatgaaagtaatagtgaacatttttcttctctttagttgtatagaaaactatgtaaaaagtttacataataaaattatagtgatctgttaaatttctacgcaaaaaagcacttgttgcctttaattgacaatcaagtgctttcagttcatatgtttttttagtagcataaattttgtaggtcttcgcttgattttatattacatctttctataaaaaactgcagtccaattatatctaacacttgggctacacttcatatcagacattttttcatataaatgttcttagtatattatttttgtaactttaaactagcaattaactcatctaaactatccgaaatctcttcaaatgaacctcgttcaaaatcctccaattcaaccttaccacttacattatctaaaacaactatcaaaccgttcccctctacacctattggagtcttatcaaccttattatgattgtttttatacccttctaaattactttcgaaggaatccaattcaatatttggtaatacaggttctagcctaatataatgattaccaataaatccatctaaatcagcaaaccaataagaattaaaataatcatcaattgaagtgtgcagtttaatttcaaatctttcctcaatcttcgttaaatcattcttattatttttttcaataggtttccatgaaatttcttcttcatcatccatttcaccctgatatataaatgaatcaacttcttcgttatatggcgttttaaataaaaaatctaaccctttatcaaaatattcttttcttaaattaaaatatttgctcatagcatccttcattaccaaaataatcacccttacttttctaagaatttttctaatagttcagcatatttttggtcatttccccaaactcctgcgcttttctcagcattatgaatccctcctaaacctggatgtagctttgagggtacagccacagcttgacctccaccaccaatgtgatgatgtattaaagtgtcattatataattcttttaaatcatattggggaaaatgttttctaaacgttggattgtttataggtgcgaatcctaattctattttttgtctatttgacctattaaacgcttctgggtacttctctaacatctctttccaataaaaatctttatcgcgtaaccaaccctctgcattggtgtttttttgccctttaccaacatagggcatctcaacagttaagcgaggatccgcagtatatttagcctctagcttacctaaatcagcaccacgatatgttctaataggatcattaatatcacctatcttcttaaccgtttcacccgtacccttactagcaagagaagcctctacacccttaatctcatcatctataatcttattacttgctgtatgatgcttattcacccagctttgtttagacgttattaaaccttagtcgccactttcaaaacttttcgatttggctgtcatatcatctatgctttttgctgtttttttccaatcttatccccttatgaattctggatttctctatacttagcaaatttgcaatagcataggtagtagtttattgaacctctctgttaaataaccgttctattctaaaataaaaaggggtatctcataagcaagtgaaacccgccacttataagatagccctttaattttaacgctctattaatcatgtaatttacttaagaactctgtgaatgtattagcaacaaaaaatacattttctcttgcgattttctctgcttcttctgccgtaatcccttcactttccatcagcgcttccttttcccatgcatcttcatgttcccaaaaaacaacaattggattttcttcatgatttttataatcaaagcaaattaaatttcctgctggatcaattccaaaaggaattacatctctaggtaaggtagcacggtagttattataatctcttacaatataatcactactctcctcatcaaaagaaagtaatgcaccaaaaactctttctattccttcaacatcaaaacaatatggtattacattagccccatgatttacctttgcacactcgatataatcttttggaaactcaactcccagtgattgacctattttctccacaaattcttccgtaaccgaatcatccgcatacttccattctaaattcttcatctaattccgcctccccataatctatttccacctaaatgattcacactatgaacttcttttattactaattgcattttccccggtatttgatgatgatgccatattaatccatctattctaggcaaaccatcatttatttgagctaactgctttttagtgaataattcttttgagatttcgcctttctcaattgcttcttttaccaatttagtacattccctaaattgatctgtatctttcataacatagaaatctttctctaactttaaagaaaacttaacatcatcccctttaaatattgggaatcctaaaatatcaaaatctactccttttttcacatgtgttcctcctgctaaaggcttatttaatatattatttttcgttttagtattcaaatatgtttctgttagttctacaacttctttaaactcttcaacactatcatacccaaattctttgatggtagtatcatctacttgttttaagaaatcttcaacactatcatatcccttaggaacaattgatctattaatcaagtttccgtctttatcgtaattatttttaattacttcgtcaatttcagatctatgaacagcgttacccgtacccttaaccccaccactctccaaattcgagatcctactctgaatactcgctttttaggcatcatgggcttcttggaatttcccgctatagttcgttccagttctaacgacacttccatctggcagtatttctacacctttaacgaatggggttacggagtccgcaccttttgctagtttaatttcaattatataatactaggaatttatgttagccttaattcataaaaaattacttcttataaatttaatccaagtttctcgttaccacatttctatattataacattaactcaatcgtatcttttaaagcttcatttacattaatagccttttaaataaaaaaactgaaagaggattaatccaccttccagtttcttctttcattattctatcggccccataaattgagtaattaaataaacatgctcgataagtttgactttttgtaagttttctactttttctggtccacctagtgcaagtaaaggtgtgtaaccaaaacattcatctatttcaagctttccgtatttatttaatgcctgctgataatgcttccaatccaatactttctctaaaaaataatcatctttcgtatttttaaagaaaaacttgaattttccagctactacatctaccgtaccttttcgatacttaagtaataataaatagttattttcccacacaagaatatctcccatacctgttgtaaaaattgggatagcttcttcataacggatataactttcctttaatatatctaaatatttttctgggtttattgctcttaagtatccatttaacatactcccaaacccatagcatttccataaatctattatttgatctggaactttccctgtatacttttcaataacctctgttgatggtttttcgaaagatataaaatcatttatattttccatagtatccccctactccgatttcaatctaacattaagatatgtcaattttttttcttcctctgataaggtgtcagcaactcgtctaatttccttatccacattaccaatcctgcttttccactgcgaacctattgatgaattaattctagaatcacccatgccagttatttttaatggatttccacccgcaatttgatctgggtcatgtaatgcagctttatcctttatccgctttaaagcttgctcttctgcttccctaaatgaaaaaccttcttccataaattcatcaattttatcttgcacagcttgttttcgtgttaatctttgagctgaatttgcttgttttgatctcccatattttaaaaattggttccgattctaaataaactcataaactgtcaattttcccagtccatcttcttggttttttaattgtcgtataaactcatcttcattatgtttccgattacgtttaaattcgattccaatttcgtcagtacgcgagctattattacccactccgctagttttattacttccttctaatttactatgcccatgagcaagttgataagcgtcatccttagttaccgtacttgcctttgaaaactttccagttacttctccaacagttgaaggaagcttcactcctattccagtatccaccatcctaaccgttactggaataggagtatttttcatagcatctagtgcattctttaaagtcttattttccctaggcgattgtaccacattatttctacgctaaaacacaaaaaagcacttgttgcctcaaatagacaatcaagtgctttaagtttcatctgtttttaagcagcataaatttgtaagttttgtagtaacagtatgacaccgtttatatgtggtaacaagtactaagttaaaacttacgagtttgtacgagttcgttagtttaactactttctttcgttgaactactaaaagaaaatttctattttcaataaaactacattctcgaactgtaatcaattgtaaatacctttttatcatctgatccttgaattcaaataaaaagtttttaatagaaataaaaaagcgcttgttgtctttcgtagacaatcaagtgctttaagtttcatctgtttttaagcagcataaatttgtaagttttgtagtaacagtatgaaactttttatacttcataacaaatactctctaaaaacttacgagtttgtacgagttcgttaatttaatatacattccatgcgtttatattcatcccacagtaaaatgtcatctcgcctaagctcgtacttctttttctattctatccttgcacgtaatactctatttaaagcagttacataaaaaccttgataagtattcaacttatcaaggttttagctctataacttataattttcccatagtttttttctcattatatgtgtctctaaatctgctaatctaacaggtatgggtaaccgactttctttattaataagcctcatgacaatttcagtacttgtctctaaatcaatccagttaccacatgaaataaaaatgggttttacacttttggttgttcttaaagctcgaccatatatttcattattaatgataatatccgtatacgatccctcttgattttcaggcatagtaaaatctacacctttaatctttaaataacttttcgctacaccaattgttggtttatttaaatagaaagaagcatgtgttgcaatacccatgtgtcgataatgcaaataaccattcccatcaaacatatagatatctggttgcttagttagtttttttgctgcagctttaattaaaggcaactcacgaaaagcaagaaaacctgaaatatacggaattgttatttctccataactgtacactttttcaacaacttcatgtgtactaaaatcaatgactacaatacagcatgtaccatacgttttaccatttaattcccaatacgctaaatctactcctgcaacaaatcgtatttcttctaattcaaaggtatttctaagttgtacttttggtaagaatgcacgctgctcatttttaaattcctctattaaaggttttaatttagaattatccattgcaatcacagcgtaaatttttttcaataaatagtaaattctctttggctgattcaagattttgtttttttatatattcttgttgatcccactcagcgcaacataaacatatcgccgcatttaaatttctcttcatatttccctctccactttcataccaaatttagtgcatacctcctgtatgtcttctaaccatacttcatttaatgaattacaactcaacatttcaactgattttgtatagtatttactttattatacttttggctccctactgaattttttagcatataataaatctgattcacttggttctgttttttgttctataatattcccttgttcatcatactttttaaaagtcatctcacgtccggcaatacattcagactcatactttttagccctgttttcaaagaattcaacctggtagccttctgccgagtttttattcatatttcctatcctttttatattaccactcggataaaattccacatattttccttgtttaacaccattttctacgtagaaataactttctatattcccattttcataaatatcgtaagctaatccagtaaataatttttcttttccatcatcagtatactctactattcctaaatcataaggccctccgtattctaagtactcctcaaactctaggccgttctgtattatatattccttcgttaatatatcatttaacattttttgaaacctccgtgattatttcaaattcatctgtaagataagcacaatgaggacaccttagaaacatcattccagctggttttgttctattttgacccgtacgaattacattgataacaaaattatccaaaccagcacttggattagcctttaatgctttattcaaggcaattacttcagcgtgtgaacctgcaccttttgtaaatgtatatgaatcaataacttcttgtggcatagaatcatatcttgactttattaaaggatggaaatcgggcaatattccatcgtagtcatttatcgcataataaattttaccagttgttttatcatacactccagcaaaggctggaccaatttttttcttacttatccccgtatcctttaacttttgcaattccttaagtgtttcgccgcgtaagttaatcctataattcaattctttcgaagtaaattttccatatttattacgtaaataatctattcgactattacccgtacccttagctacactaccttccttactaactcctgaaccaccactacccttagcaagttgataagcgtcatccttagctgccgtacttacctttgaaaactttccagctacttctccaacagttgaagattctatataaggaagcctcattcctattccagtatccaccatcctaactgctactggaataggagtatttttcatagcatctagtgcattttttaaagtcttattttccttaagcgattgtaccacatttccacccaaatttggattaaaaccaggcattccttctttgaattttaataatttggctaaatcagctaattcactcgtccctttgaatgcttttactccttttcctactgctccaacaactgggattgcatctaatccgccaaaaatgatgtttcctacccgctcttcttggctcaatttcctatgtgttccccagtcttctccgtcgataccgctttttatttgtacacctccgtatactactgcggcagcggccccgagtggtggacaaaggattgttgtgatgatgattcctactcctattcctatgtctcgcaccatttctagttttttctgttcatcttctatcgatttgtattcaaatcctcgtgtggatgggactactttcttgtattcttcataatttaattttgcatctggattttgtttttttagttctttgtattctgccctaagtacgttatcaaatgcaggtgaatctctaaaaatatcttctactgttattttatctttcttcttctgtattgtttgtggtacacttccgtagcctgcatgcgcacctggtaatactgtcgttgttgtagagccaattcggttatttgtttcaaaactgagaatagatgtatctctcattttttgagcgaatttatccatttctactaaaaaaggtttatctatatgttcagatactaatcgccctgcttctccgcaatatttttgtaatgtcgaatagctatcaagtaattccccgattttttgcgattgatctttaggattaaaatgtatactaccatccgagtctaaatctcgtattcttccatcaattctttttaatgattcatttgcttcccgtaattttatgagtgcatcttttgtaattcgattcataccatcccccatgttttgccatggttcaggtctatatttcacatccatctcgttttcatccccccagccgtatggtgatttctacaacttacttaatatttcacgtaattgttcgtccttttcaagcatttctacacatacatttcctacaactgtcgctgacctagaatagtgttcagccaattctagtgttttgtgtaatatatcaggatatttttcaattactctcatcgcttcacctttttgataaaaattacagcttaataaactctcaatattcgttccaatgacgtctacatggattttatatatattttctaacttcattactatatcaagtagttcttgaaaattaactaatacttcttctccaccaccagaaccactatctcccattgatacttgcattattgaatacctcctaacgagaattgtctcgggtcaattaactttttatatggcatttttaacacgtcatacaatttcttattaaccgcatagaggctcacccagtcatatcgattacgatctacatctatttgaacgaaatcttctccttcagtaaaatataagaaacattcccattttcctcctctattacttcgaggcctcgtatacgtttctatcgctataacgtctttatttgataaatctttttcctcaaatgtttgttgttctgcctctgtcattctctttgagaaaaatgtatcttctatttccctcggttctctcaataagaaaggaatgcgtgttaataatgaaaaatatacgtccggttttggtatgtagtcgatctcgtattttttatttggttctatttctgttaatacagccactcggtctttatcctcttttaaaaagccaattaatacattattcattctcgtgtattcatgacaattttcatattcctttaatagttcaattatttgaaaagctgcaggggtaattccattttcacttgtaagtaggcctttttcttttaaactcgtagttgctttcgtgacacattctgcatcaagtaaaataattgcgtcacggtttggcaatccaaatatatcggtaaccccagctgcacctgcgagaacatataattcagcaggtgcaaaactcatttctttccccattcttttatccctcgtttctccatcacagttgttttatctcccttacttccgatttatctccgtacgtttgaatgcttttatctaactctttcaaagctttcgtatgtccttcaaatgcctctaccatttctgaattatattgaatgatcaaatcaagataacttaaaaatgcatctctcgtttttccattccatttcgcacctgtgacatatgcttttaagtctttcgcttggtttaaagaatccttcataccattttcaatgttttgtgcgtaagaaatggcacttgcagtgttacttcctataatttcaacctctttaccactcatgttggttccctccattctttgtatggttaatggataagtttttcaaattcctttttcttttcttcaaaagccttggtcgctgcagcgtatgctgacgctttctccgattctgctttcgctttatattccaaatactttgcataagctgtactttttgcagatccaacatcgcttaatgcacttttaaaataggatactaatgtatgtaattcttcatccttttcatgacgtttttgttcaaattcaactgccggaattttattagcttctaaaccattacttttactctcataatctctcttcgctgattcagcatcttgaatgaattgctttaactctctttctttatcttttaaataatcatgtaaatcatcataccgatctcgtttcctcgcactttctgtaaaaccagacgcatttaaaaaagcattgtacaattcatctaacatctttctccccctttagcacaataactatgtagttaaattcgtatatttaaacatgaatattcattacattaagaattaacaaataattatttttacatattgctattttatcaaagggattttaacatttccatattttatgaatggctttcgcatttttcttcaataaagtgaaactttaatcaatatgactatgtatttatgtgcagaaataataaaaaacactgccaagcgcagtgttttttattattaccttttatccaattcattcgtattaaatccttgcttgagagtaagaccagttctttcttatttcataaacaactatttctggataatcccaatgaagcgtacgagtaggctcccggactcgttttactattccttgggctgttttatttctatattcattccaatattttggctcagtcgctcttaaaagaacaatagaaaaaggatctgatatgaatatcagatccttaactttaatttcttaatacatacatctttttacacgataactggttcatacgtgctcaaattatcatactcagtttttacaatactaggcggaaggttaacacatcctcagattcaccttttcttgtagcagtgcataatgtttaataaaattaaagcatatttttacttaccagacttaattttttcgttatattcttctaaagttaaccctttttcttttagataaacagcaacttctttccctacataacgatagtgccatggctcatacttaatgccagtaatattctctttatcttttggatagcggagagtaaatccatattctgcagcgttcttatctaaccatttgaatgcatcggtagtttcaaattttgcatttaaatcttctacagtattttgccattcaactgaaataatgtctaacgctaatccagtatgatgttcacttgcaccaggatactgaagatattccaatgccttagcactagcctctttatccgacaagccttgagatttatagcttttaactgaagcatcataataagtttgttgtaattttatagctcgataacctgatcttaaataaagattgattccctctttttttgcagctgctaccatatcctgataggaagttgcaattctactatctattttcatatttggcttcgcattttgagtgatacttgttaattcaattcctagttcctttgataacatatgctctctatttacaaggataattctccaatcattaacatcagagataggtaaaacatcttttttcttcgcatgtatttcatttttatttttatcgttattattagtagttgcctgagatgtttgctttccactacaagcagcaagactccaccccattgctaataccaatgctaaaattataaattttttaattgtatctcattccctttttgtttattagtctttataccaatttcccaacacgtctctaggaatctccttgaaatccttcaaagaaacgggaccgacaaattttttaattccatgttttttagaattttcatccgaataatcttttaaaaattgaattttaaattgtttcttaccatcggcatagtcggttactgtcggtacgattgccgcttgtcgtataccaaaagttttatcttcatacttaacaaattgtacataagataatcctccaactaatgtttctaatttttcttgcgcagaaataagatttccaagagaataatagattagcgtttcatgtccatctttattttgtttccactcaattggttgaattacatgtggatgatttccaattactacatctacacctaaatctgttaaatattgagcaacttctttttgttgctttgaaggtgttgaggtatattctactccccaatgcaccataacaatcaccatatcagagctactctttgccttttccacatcattttgtatcgcttttttatcaattaaatttaaagcccaagacttatcagctggaattttaattccattcgtaccatatgtataatttagtaacgcaaaacgaataccattttttgtaatcgtttttatttcattacgctcgtttttactctcattaatacctaccgggataacatccggatatttcttccagtattctcttgtattcgcaacacctttaatacccatatccatagcgtgatttgtcgcttgcgtcactatattgaatccagtgtccactaaagattggcctacttcttcaggtgtattgaaagtcggatatccctgtacttttaaattatttccggcaatcggagtctcctggttcactatagcaagatcacttgatttaacagcttttttgatattttcataaatataattataatcatatgaaccgtctttttgtttgccatctttaattactgcgtcatgatataaattatcacccgtagctattaaattcacaaccgattgtacttttttatcttccgtaaaattaggagactgttggataggacttttctctacccaatttggtgcttttaatgatgtatctatattggattcagccggtggtaatgaagctttagacgtcttaacatctgtattaccacaagcggttaaaagcactaaaaaaataagacatactaaaaaaaactttttacttctctgtaaagtatctaacatgtgatcctcttttctgttttattccttataaccagttctaacaaatcattctttaaaacaacgtattttggttttacccttaattatggaaggacactctgttacacctgcttcggaatatactaataattgttttccgctttctagcaatctatcgattccatcagaagtgataggttactagaaaaagatgatccatcaggatgtcgactagtttgatatacctattccaattgcaataactcgtttaatatttaaacaagataggagaatcgttcatatagcctcttctctcgctttatgtttaaagtgcctccaaaaaagggatcgttgctgtacccctttacatagtacgaaatttttgtaactaatttctttcattcaagcgacaaacattataccgataacaataagtaagacccaagaacttattttaccaatatacgaaaaaagtagcaatcttttgtcccatataaagaagcccattaggagaaatgaacgagagattcattctattcaattcctgcattgattaataaaaaaacaagccacccaactattggatggctctatactataaagagaatttgttattggattacttcaatttcccttcaaaaacaatcttcctaccgcacggttcaactactgttttgccgtctttttttacttcatgaaagattggctcttccatacgacgagacggagcgtagccttcttgttccatacgtgctaagcagtctgtaattgtttcattttcaagtacttcaaatttctttttattaggttgttttgtcatgccctaacctactttctatttttcttgatgcaaattgatttttcatgtagaccatatataacattgcgagaattcccattataatcataaccgcaataaaaaagcttgtatactgtattttttctataaatacgccgcctaatacaggtcccataatacttcctaaactaaaagcgattccggataatatattacctgccggtagtaaatgtctcggtaataaatcagtcataaatccaagccctaaagagaagcacgatccaataaccatacccgctaaaagcatgcaggcaaagacgatccagtaatattgatcaaatacggcggcaagtagaaaaatgcccgtacttatgctaaacgtccacgttaatatacggtcccttccgtatttatcactcaatataccgagcggaatttgtgtaataatacccccaactgcaaatgctggtaataagaaggatacatctgaaacagaccaccctttacgaagtgcgtatactggtaagttactgtttaacattgcttcaagtacgccatatgcaagtggtcctagcagtgcaatccatcctaatccaacaacttgtttataacgagaaaatgatgattcactcttcacttctctttcatcttgcgctgggaatgcattttttgttggaagtagtaaaagccaacctattaaacaaagtaaagtagatataataaatggcgttgcaagaccgtactgcacagtgcttgctaaatacgggccaacggcaaaaccaattccgaagaatacaccgtatatcgatacttgtctccctattttacttgggtctgatgttgtcgtgatccacgtttgtgttccgacatgaagcatatgatctccgactccaactagaaatctaaggataaaccatacccaaaacgaaaatgtttgtgtaaaaaagaataatgaaataataacgagaaacccacctataacaataatcggcttcattccaaacctttgcatcggtttttcaagaaacggcgaaatgactaatatcccaatgtacaatgccgtcgcatgaataccattaatacttgaactaaccccttcttgttcaaaaatcattgcaatggccggtaagagcattccttgtgataaacccgagattgctacaatcccaaccataatccaaaaagtaaaacgcattgacatccctttccctctccttctcacgcttccacttttcattataaactgtttctgcaaatgcgtgtacgaatattcgcaataaaaaacaagctaaaagaatgaatcttttagcttgttaccttatccttcccaaacttgtgctttcacattgttatgaaattgcttaaagtatggatgtttataaaaagcagtttcatataagtattgctgtgcgttagcgattggtggctgcggatattgcatttgtaaaggaactacagctggcgaaacttgcatatacagcggttttatcatcatttttgtatatgcgtaatgattatatggcgaataagcgatgaaaaatggttgatgcattgataatctcccctttaacatacaaatgttatagtatatgcaatactgttcatttcggggattatttctgttctaaccaattctctacatgttttataaatacatctaaacaatcaataaacggcgagtgtccgcaatcttctaataccttcaactctgcattttgcaaatgtttcgctaattcctcaccgactacttgcggaacgacataatctctatcgccttgtatgacgagtgttggcgctttaatacgatgaatttgcttacttccctctacaaccccattatattcatctgaaatattaaatgtaatgagcgcataattcacatctacgaaattacgttgcgttaacatatcatctaaatacttttcataacggtccggttcaggttggttatgcgtatatattaatagattccatactgtacggtaatatagtttgttcatattttttatcgcgtctaatactggagcgatttgtactggatcttgtgcaatttcttctttcgtctttactaaacttgatacaatcggctgcccattcgtatcttttttaaagattgggtaacctttcattcctactgattctactaaaattaacttttctacaaaagttgggtggttcgctgtaaattgcatcgcaacgccaccgcccattgaccagcccattaatgagaatttctctagctttaactcgtcgataaataattttacatcttctgcaaagtcttgtaatgaatctatcgattgattatacgttgattgtccaaaccctcttaaatcaagagcgtaaatatggtattgatcttgcaacttttcaataactaaatcccaatgttgtgacgatgtcatgttcccgtgaatgagtacaagaatatctgtatttcgccttccaacttcctgatatgcaatcgtttctccgttcgatagtgaaacaaactccattgttgcaggcttaatcatcacaagttcccccattctatttaatagaaagaaaattctttacttaattaaagaatagcacgtagaatgtacgttcgcaacataaaacctataagaattttttacataaatcaacatgtctattactagacaattattataaaaaagtatatagttagctaggtaactaatttgaaaggatcaaaatacatggacgaaaaacaacatttttttcacatcgtcagccagacttctcgaaagtttacgaagaaatttaatgaacgtgtatctccaacagggttatttagtgcgcaatgggctgttattttccgcattaatcaaactggttcttgtacgcaaacagaattgtgccagtatttaaatgttgaatcaccaacgatgactcgtacgttaacacgtatggaaacgatgggatggattattcgtacagaaggtaaagatcgccgtgagaagctcatttctttatccgaaacagcgataaagatgattccaatatggcaagaagaagttgatactttcgaagaaaaaacgctagaaggtattaacgaagatgatttacatcaagcatttcaagtgttacaacaaattattaaaaatttagattaaattggagggatgacgatgcaaagtgagaaactttggacgaaggatttcctcggaacttgttttagtagtctatttctcttcttaacattttacatgcttatgactactctacctgtctatgtaatagacggcctaaaaggaaaacctgaggaaattggtttagttgcaactgtgtttcttatttcttctgttttatgtagaccattcacaggaaaatggctcgatgatttaggaagaaagaaaatattatttatttcactttcattatttttagccgctactgttatgtatttcggtgcgcaaagtttattcttattacttgcccttcgcttcttacacggtattgggttcgggatggcaacgacagctactggtacgatcgtaactgatgttgcgccagctcatcgacgaggcgaagcacttgcatatttcggcgtatttatgagtctgccgatggtaattggtccttttttaggtttaacaattatttctcatttttcgtttactgtgttatttatcgtttgttccgtattttcattacttgcatttttattaggactacttgtagatattccacacgaagcacctgttagcaaacaaaaacgtgaaaaaatgaaatggaaagacttaatcgaaccatcttctattccaattgcacttacaggatttgttttagccttttcttatagtggtattttatcctttattcctatttatgcgaaagaactcggtttaagtgaaattgcaagttacttctttattttatacgcacttgttgttgtcatttctcgtccatttacaggaaagatttttgatcgcttcggtgaaaatgtactcgtttaccctgctatcattattttcacaatcggaatgttcatattaagccaagcacaaacttcattttggttccttggcgcaggtatgctaatcggtttaggttacggaacattaattccgagtttccaaacgattgcgatttctgccgctccaaaccatagacgtggttctgcgacagctacgtatttctcattctttgatagtggtattggctttggttctttcattttaggtattgtcgcagcgaaatccagttatcataatatgtattttatcgcagctattatcgttgcgttcactttacttttatattatggattacacggacgaaaacaaaaattcaagaaacaacctacagacggaaaaatttccgcttaacgttaataaggaaagtaaacttccccgtttactttccttattttgtatttctttcaagacgagcgtatacttatagtagaaataaaaaggagggccatatatgaaactaaaaaaatctcccctactcttacttatactaacattcatatttgtaattacagggcttgggtttacttacttcaaacaaaataaaacgaccccatcaaaacataatgtgacaaaagaaaactggttaaatgacccttacttacgttggtcatatacccatatgaaagaattcactttagttaataacgtaaaaaacaatcctgaccaaattgctcacttcccttccgcattgcaaaacttagacgattttgctgtggagcgtagattcggaaatacaactcctctaaaaaaacttttagacgataacaaaacagatgcttttgtcgttgtacataatggacaacttgtttatgaacgatatttcaatgggtataaacagaatgaacctcatggtatggcatcattagcaaaagtctttaccggggcgattatacaatctctcgctgaagaaaaacgtattgacttagaaaaaacagctgacacttacataaaagaattaaaaaacacaccgttcggtaatgccacacttcagcaattaatggacatgcaagtgtcagctgaatatcctactcatggatatgagcagcctgggctagaaaatcaagatgcacaattatatttagctagcaatattttaccccgcggcaaaaattacgacggtccgatgaaaatttatgatatgttacgagaagccgaagaaactgcaccgcctggttcttccttttcttacaataacggatcaacagaaacgctcgcttggattattagaactattactggtaaatcactagctgaaaatgtaagtgaacgaatttggtctcaaattggtatggaagaaaacgcgtattacgttacagatgaaacaaaagtagaacaagctagtgctggattaaatgcaactgctagagatatggcgagattcgggcaattactattaaacaacggggaatataacggaaaacaaattctcccttcttctattacagaaagtgtaaaaaatgtacaagaaggtgaacttgaaattagtagtggcgcttctatttcttatcataatcaatggtggattccccacaatgaacaaggtgctttcgaagtgttaggtagttacggacaaacactttacatcgatccgaaagcaaatatggtaatcgcccacttctcttctaacgcaacgccaagtaatgaaatacattcggtttattcaaatatgtatattgatattgcacattatttagaaaagcttccacagtagtggaagctttttcttgttgggacattttatttatactcctacatattagaagatactgaaagaataactgcttaaaacacgcctatcaaaatttatataagcagtttacatgtttaattaagtgtttaactaatacatccacaccttttggagaattcgttaaaacacttcccttacaaagattgtctgttcatattggtcgaaaatttcttctatagatgaaaataaagtttcttccgggatgatgaactttattttttgaccattttttaacataaaggaaattgttccattatcattaaaacctgtatgaaacgttcctcgtttatttaatactacctcttcaattgtatttatttcaattgaaaagttattctttaattgcaagagttcatgtacatcgccagtatgtatttttgtatctatttcagtttctaagtttaattgttttttctcaatttttttgaaccagaacaaaaacaatagctctgaaataccaggtaattgttttttataagcatatcgactatgaaactgtccgccaatctttataaaatatatacagtcacctgtaataaaaactttataatacatatctgccgtaaacattttaggctttaaaagataaaaacttttgatcataattcccccatcaattttaaatgtatttgtataaacatttttagctagatttgtgctaaaacatatttctcatgtaatacaacactattgtattgaatctcctctccctttgcaacagttgctttgaagccagctagtaacctttctgtatactatccctataagtgctaccccatttccaaccgttttcttctagtatattaaaagcagaatctgatacaaggctctatatcaacctatcaataaattatcaccctataaatatctgaattttctttatattagaggttatctcctaaacaacctcgaataattgtactacatatacataaggagggtgatctattttgtttcgttcctttacaaatggttgcgtcgccttagtgcaacgcttcttgccagaaccgtttattttatcatgtttactaactgtttttgttatcttctttggtatgtttgcgactcaccaaacccctgtagaaatgattaatcactggggtaatggaatttggggactcctcgccttttctatgcaaatggcacttgtactcgtgactggatctgctttagcaaatgctcctcttattaaaaagggattaacgaaagctgccagactaccaaaaacgaatggacaaggcattattgccatttcaattgtaagtttacttggtgcatacataaactggggctttggaattgttgtatctgttttatacgcaaaagaagtggcaaggcagctggacggattagattatagactagcaatcgcctcttcttactctgggtttctcatttggcatgccggtctttctgcctctatccctcttacgttagcaacaggcggtgaaacgttaattaaaacgactgctggaagtattaaagaggcgattccaataacagaaacgttattctcaccatacgctctcgttccagttattatttttctcgttacgatgcctctcattaataaagcgatgcatccagatgaaaaacatacgattacagtagatcctagcgtgttccatgaagaagctgctgctcaagaagtagaaaaaaatacgttcgctgaaaagatggaaaatagcattattattacactttgcgttggattgttaggtctcatttatattttcaattacttttatacgaaaggttttaaccttactctcgatatcgtgatttttatgttattaattgcaggtcttattttccaccgtactccgattcagtatattcgcgctttttcagactctacgaaaagtgcttctggcattttacttcaatttccgttttacgcaggaattatgggcatgatgattggagcaaatagtgaaggactttcacttggaggagctatttctaatttctttattagcatttcaaatgaaacgacttttccgctctttacatttttaagtgctggcattgttaacattttcgttccatctggcggcggtcaatgggctgtgcaagcaccaattatgattccagctggcgctgaacttggtgtacctgctgcaaaaacagcaatggcaattgcatggggcgatgcttggacgaatttaattcaacctttctgggcattaccagcattagcgatagctggtttaggtgctcgtgacattatgggattttgtgttgtgaacttactatatgcgggttttatcattagtctatgcttcttatttatttaaacgaaaagctagttttatactagcttttttacataataaatcacttatttcccatgcaatttataatcttctcccactctatctccgtaagatgtaatgactcaaatgcaaaaaaatcttcgcaaatttttccgattaagtgtggatgttcactcaaaaaattccactgtaacgctttaggaagaaaatatgtttcatattctttacttccccgtactatctcatctacttctctttcacaaattcctcttattaaataatcatttcttaactctatttgaatttgctgaaatgtttcgctacattttttcaattgaagtaaacgcgtaacatacttccgaaaaagttcgccatcatactgaacacagtttataatacagtcaacttcattcataatgtacgagccttttcttctatttgtaataaccatttttcacgctttgatactttactctttttcacagattgaaacactgaccgttttatattgcgaatgccacaaaaacgtaaaacacctctcttcatcataatccaatctgctgatcgatataacaatgcgacgtaccataggggcgagtctaacttattaataacccatgcttttttcccttgcaataatcctttcggcagagccccttcatatttataagcaaatccagctacgaaaatacgatcgataaatccttttaaaattgctggcatcccccaccaccatattggatagatgaataaaagtgtatctacttcttctactaacgttctgtaccgagctgtttcttcttcatttactaaatcacgtcttttcttctcttcattaaatacgaggactagatcaaattgttctttgtataaatcaagcagcgtaactgaatgatttgtttccggtagtcctttttgcacatgatttaaaatcgccgcgttaaaacttgaaggattaggatgagcgtatacaattagtacgttcactacataacaactccctctatacgttaaagtttccccttctttaacatcttctctacaatctgtacgtttttcgaactttgcaataatcgattcaataatataagtaattcttctttttctaaatctctcagtttctctttaactgcactctcaccagcaccttgaatatcataaacaactgccgccatatgcttacaaagattctcatatggacatttgcagctactttctgaaaaatcttcgagatcgataactacttcataatttcctgcatttccagtaacgaaagcaaacacttttttatcatgtatttcaacatcttctacatgtccatcttcataatattcatatcccttatctacaatgtactttgggatccatttcgttatatcttttaataagtaagcgtacataattgtaccccttcctttaattcccttttgacttcaaaaatcctgtatgttattctaataactgtcaaatagcaagtctatatgacaaaacgactgacacctattcggcgaaggtgtctcttttcatttgcagccgatatgaattgcctctttcaggcacattcaatttttgacactacacactcaacaccattccctgtatcaggctgctttagcagtcttttactctacatactccgttattttaagaaaaaaagagagcttagctcccttttctcgccttatacaatacccctttttcagcatagagatattcatcagctaatgtaattttcccatccagttttagttcgtctaataatcttgataaataaaattgatgcaacatctttttcgtgaattttccttcatgatgcgaaacgatatgttcttgaatatctaacaatgatatcggcttatcttgctctatcatatattcataaactgtactacgcagttttacgtatttttcgagtgtcacagtaatgcgcaacccctttcttcttaatataaattttcgtaatcggtttttttgcaataaaaaaacctctccgataagaagaagttacgtatatatcttcgtcttatctcccagaacaaatatgttctgctggaattagcacctgcatcgcggttgctgggtttcatcgggccagtccctccacctctctggataagaaaatattcacttaattcttactatacgtaattccactttaattgtcaaataaatataacaaattatattttcttccttactgttcatactacccatatacgaacacgcaaggaggattatgaaatgcatcaaaatgctcgcggatatgtacaagattcttttcaatcattacaagaagctaaaaattgtttagaagaagcgctcgaaacagttgaaaaagattttaatcgcgctcgtattgaacaatcactttatgctgttgaacaagctattcaacgttgcgagtacaccgttcacattttagaaaaagattaaaaacttcccatcaattgatgggaagttttttcaaatggcatacttcataattattgccgttataattaaaaaatatacagaattagcaatttctaaaattcctacttttataatagaaatttttttgccatacaacacaattgctcgaatggcacttggtataaaaataagagaacaccagggattaatcacaaatatgattatcgttaatacgatatgatatccccaagatataagacgatacttcgggttatttttttcacgaatcatcgttttcacatagaacgtactacctaaaaagtataaaaatgaaataagtgcaatgaatatagctgtatgaccgatttgcttcattgaaaagtaataactaattaatccaccgatacaaaacacaataatcgcacaaatatcatttaatagtgctctttcatttttttgacgagcgtaatacatattcactataaataatggaatcattactattacgaataaaagaattcgccactcatataataaagaaatcatcccaaataggaacgcaatactgaaataaacaatggcagcttgtaaaaactctttttttcgtctttgctttatgtacgtaagaaatggatacgtggctaaatagataaaaaaccacgctaaaaacaatggaatatgataaatagtaggtttcccaagtatgacacttaataaaaaaggaataacaagcatagcccatgcaccatgttgcttcggaataactaacttcattaactatacacctcccttttgaaaaaagttctcacctaccattatacaaataattttatataataacggatgtatattaaatcgattttttgacaaaaaaatgctccttacagtatgtaagaagcatgaaagaggcaaacgaatatgtaagtcgcgaccctaccttatatgagtatgcttttctatgtcacgttatgctcatctaatataccgtatttctttttaaatcttgtaagaatcgtaatccatgaagtactaaatagtaataagaaaataacattcgaaatcgcatggctcaaatcaaagtaaaaacttgcgatataatacgaaatgacagtttcccatgttgcttctcgtataaaaccgagaagaccccagaaattcataatccagccaaataaaaagccaacaattactccgtaaagaagtcttccccatagctttttcataaaaaatgtattacgaagtaaacctgctataaaaccaatcatgccccatgaaaacatttgccacggtgtccatggaccttgtcctaaaaaaatattagatacgattgctgctgtagcaccaatcataaaaccagtttcactaccaaatacaattgcagaaacgataatgacaaaagaagttggttgtacacttggtaaaatagaaaatggcacccggcttactgctgcaattgccgctaatacagcaacgagaacaatttcacgtgaaacaaacgcctttctttcaaaacggatatagaaaggtaacataataaccgctaatataaacaaactacttaacatgtaataaccgtccatgacaagtgtcgtaaggagtaatgtgccgattattactgcaaagatacatattatgaatgcaacatatcttttggacaagcttcgtacacatcctcccacgttaatgcatatggcaattcttttcgaatgaatcggttaatagatgttgtataaaagaagttgccgctaaaaaattctttcggtgcatcattcataatgactgttccatcaaataacatcatacattgatcaacgtatttcgctgcaaactcaatatcatgcgttgccattacaattgttgtaccttctttttgtagcttcctaaatagctctcctactctttctttcttccatggatctaatccctttgtcggttcatcaagtaataataaagtcggctttgataataacgttgtacataatgcaagaagttgttgctctcccccgctacaatcgtgcggatggcgttctttaagcgagtacaaccaaaactgttttagcgtatcttctgctatttcttttccttgttctccatataattcacgcgcacgttcataaacctcgtcccatactgtatcaaatgtaaaatggtaatacggatgctgcgatacatacccaatacttttaaaacgttctttcgaatcaattttatgtattacttttccgttccactttactttccctcttctcgctttttgtaatcctgctaaaatcgttaacagtgtagacttacctgtaccattcttcccaacgagtgctacccattttcctttttcaatcgaaactgataaatcacgtaaaataagcggactatttttttcatattggaacgaaatatgctctgcgcttaaaattacctcttgcttttcactttgtgctattggctcatttacatatgatatcgctgcaaaatcattcattttcatttgcgcctctcgcactgtaaacggaatatctctcacattccactctaaaaatagccttggaatttgcggaataaatggacggaatgtttctactccccacatatccgtaataacaattttaggactaccatcatacataatacggccattatccatacaaacaacgcgtgttgcaagcgggataacttcatctaaacgatgttcacttaaaataatcgtaattccaagttcttcattaatccgttttaataatcctaaaaactcttttgcagcgattggatctaactgcgctgtcggttcatctaataatagcaatttcggctgcataactaataccgcagctaaattaacaagttgcttttgcccaccagataacgtgtgaacagattgatgcaataaatcttgaaatcctaaaaagctaataagctctgctattcttttttgaataatatgtgatgataatccgatattttctaaagaaaatgctaattcttgaattactgtatccataacgatctgattttctgggttttgaaataccatcccaatttcttgggcagataacaaatcagctacttcctctattaaaacaccctcataaaatatctctccagaacgcgtaccaattggaagtaactcctttttaaaatgttttaataaagtcgtcttcccagatcccgatcctccagcaagtgcaataaactcacctttttgaacagaaagagaaatatgctgtaacgctttttcattttcatcagcatatacaaatgataaattgtttatttctgcatgcgccaccatatccattctctcccttccattatgattggtaaactaataaacatcgtaaatacgacaaacatcatcccatcgtattgctgaaatagaatcgattcgactttcggataaataatcaatttccccccgccataattactacatataatagcagctataaataaaatgattaaataactgagcgtataccaatcgcgcctttccattctatagcgaatatacgtcgtacgcttcgttacaccaaatccacgagcttgcatagaatctgccgtttgcagtgcatcttctaatgaacaaattaataatacttgcagcaattgcataccatttttgacgcgttcaattatcgaacctgaatctacctgcacacctttcgtcttttgaacgagtgtgattttctttaatcgccttataaacaaaggaacaaatctcactgtaatcatcgttaacaatgcaactttcggtgaaattcttgaaaacaaatataaaaatttatgactggaaataatatcattgtatgacgcaaacgtaaacataactgcaactagtaataaccccattactatgccaaacataatcgcctcaagcttaatacggctatcacctaaccaaaataacgtagttcgacctctatgcgttaataacgaattaaataaaattaccataaagaagaaaacaattgtgctcggtagcatctttcttatcttttcgctatttccttgcatcacatttaacataataattaatactattgctccaattaaaaaaagaggatgaagacacatcatacatagtatcatcaccccgatataatagaaaaaattcacaaaaggatgtaaagaagaaaaacttattttcatagccctttaccgaatgcctttcttattgtaatacgtatacccactcaattgtatctcctggttttaccgtagctacaccagcactatggtttggaaaagcaccgttcacacgatatttccatccactagtatccgcaatatctttttcatataaatcattaataccttttacataaatactatctctagatccgcttgcatcaacatctaatcctgtacgttgcaatactttatacacagtatcgccatcttgtacatccatctttttcgcacccattatatatccgttatttccttttactgagattgttacttgttttgcttgcggtttcggtactggtactggatctggttttggtggttcaggttttggtactgccggagtcggtatcgttttctccgctttattcggatcttctttttgctcctgcttcggtgtttctttcggctgattcacaacctttgcttcttcttttacttctggtgctttcggttgttgtttctcttcttgtacttgttgctgctctggttgcttatttacagcaggttgctctttcggttgttcctgttgtttctcttctttctttacctctggttgtgcctgcggcttttcctctttcggcttctcttctactttttgttcttgtttctctttctgttcttcttgctgcttttgctctgattcagcttgcttttcttttgttttttcttccggcttcgcttcatctttttgttctttttgtttcgctacctcttcttgcttcggttctaccttcttctcaggctttacagctgcctcttcacatccggcaagtagcccgagcgaaagcagtaaagaaataaaccatttcaccttactcatcctatctctcacctttcatacgaaaattaggagcaaataattgctcctaattttttgttaagctgctttacgtctccataatacatatgcagaagcaatacataatacacccatacctacttctgttgctggactatgagaagatgctcctgtttttggtagactgttaccgtttccgatttttttattcttaaccggttcgttatctacaactacttttagattttcatcttttgtttcttgttgtacttgtttttgttctttcggttcttcagtaacttctttttctactacattattttctggttcaacgaccttttctggctcttcaatcggttttggcttaattacatcaccagcgtctacattagaccaatcataaatagattttcccatttccttaaattgaagtaatgctaaaagagcctgttctgtagccattccgttaccattttgatcacttggtaaccatttaaattcaccatttgaaagttgatatgataataggttttgcattgccttatgaagacgattttgatctacatctttaacaagcgataatccaataattgcttgcgcagtactatttgaattttcttgtccatcagctgaaaaaccgccattttgcagttgttcgttatataaatacgcaacagctttttgtatagctggtttcacatctgatcgctcttgataaggagctaatgctgataaaaccatacctgttacatcaacgctactagcactatctttactacctgaactattataagtccatccaccgtctgtatgctgattatttaacagtgcttccactagagcaactctgttccattttgattcaactggaatctcatacttcttcgtatcaaatgcaagtaaagcaaatgcataacctgtaacagaattcactttatctgactcatacaatttttgaactaaattatgtccacctacatttttagggtctgcactcattgcattcatcataataattgttctagctaaatctgtcgctgaaaaacggttaatacgcttttctactttttcagttactgacttaacataatttaattttgcctcaattggcacattctttccagaacgagaaagcgctacagctacccagtcactttcaattccatcttgtaacatcttatctgatgttttagaaatggcttcgtttaattgtgcacttggaacttgaatgttctcttgctgtggttgttctggttttttaccatcttggtcaccttgatttttcccatctagcgttttatcgtcttggtcaccttggtttttcccatctagcgttttaccatcttgatcaccttggtttttctcatctggcgttttaccgtcttggtcaccttggtttttctcatctggcgttttaccgtcttgaccttttgattttggttcttctgttttgccaccgttaggttcttctgttttacacgtcccgaacttatctaacgtttctttcaatgtttcctggcttatattgctccagtctgaaacaaagcgaaagacaacaacatctccagattttaatttataactatctgctccgacttctgcagacttatcatttacatcatacagccaagcacttgtagccccggccattaaaccatcgatgccttttacatatgttccaaacgacatcgtttcagattctaccttgtcccccatgaccttttgcagcaaacttaaagctgtttccccatctttaatttgctcttctttcggacataacataatgcctttttgtgattccccaataattgcaagttttgctgtattttcttcagcaaacgtaatatgtactgtattcgcaaaagaaacaaatacaagtgtcactgccattaacgacgtaagcagccactttttcaacattgccatcccaaaatttcctcccttactaccatttacacaaaaaaaggcccttcaagggcgtgcgattgacactctctttttgtaagtgtcgaacaaaaatgtacaacacctcctacccgcattattcgcggctatatttgtataggaaaaataattttgtttatgaacgtatcattgtgataacattcacttttcttggcacaacttacttccatttaagttatcgtaaaacgataaacctatacattctgtaaattttaaatttctgtattattttactattgacaaagaattttgtccatgctttatcggatttattttctaagaataataacttattaactcttaactatgtaaactcttttcactaataatgacgccatcttcatccgcatagacatattcatttggattccaatccacttgtccaaagtgcaatgaaatatttcgttctccttttccttctttcacacttctatttggcatcgttcctaacgctaaaataccaatattaatattctttagttcactagaatcacgaacatacccattcacaataattcctgctagctttctttcttccgcaatagctgccaaattatcaccaagtaacgcacaattagtagacgctccgccatcaacaactaatactgttccttctggtaatgtttgcaatccttccttcactagtacattatcatctttcacttttacagttgcaattttcccgtggaattgttctttcttcccaaaagaccgaaaagactggcgacatatttgtaattccttttcaaactcatcacatagatctgtagttttccacatcttgttccctcttttcctttttctttctacataacatattcttggcttattatcgtttccctgtctaatattgcaataatttgtatgtacgggaaaaggatacaaaaactattgccttaagaagctacctttattataatctatttcacggattgaattcagaatattaaaattaataaagtgaagaaggaggaattttatgcaaatacaaactgaggcaaaaaaacaacctagtaaacaaaagtttaaaatgcctgatgcgtacgtactactattttttattgccttactttgcgctattgctacgtatttcgttcctgctggagaatttaaaagagttacaaacgggaccgttacaacgacaataccaggtagctatcattctgttccgcaatcacctgtaggatttgtttctttttttaccgctattgaaaaaggaatgacacttgctgctccgatcatctttttaattttatttacaggcggtgccattgccattcttgaaaaaacaggtgctcttgacggtttaatctatcatgttataaacaaatttcgtaatcagcaattacttttcatttgtatcgttgccgcacttttttctattctcggaacgactggcattatcgttaattcagttatcggttttatccccatcggtatcatcgttgcacgcacattaaaatgggacgctatcgtcggtgtagcaattatttatttaggcacttatgctggttttaacgctactattttatccccctcacctttaggcatttcacaaaagatcgcagaacttccgatgttttcgggaattggtttacgcacagctatctatatatcttttttacttgccactatcctttatattaattggtatgtaaagcgcttgaaaaaattgaataaaggaagcattcttggcgacaactggtttccaagtaacgctctttcaagcgaaaaggaagcagagaaaaaagaagttccttggacgatacgtcataaattaattttactcgtttcagctttatcattaattgcatttttaataggcgcttttcgtctacattggacggacgcagaaatgaccgctacttttattttcatagcaattacagccggaataataggtggcatgaaagcaaacgatatcgcttctacttttctaaatggctgccaaaaccttatctatggtgctttaattgtcggaatggctcgctgtatttcagtcattttagaacaaggcaaattacttgatactatcgttaaccagctcgcacagtctcttgaaggacaaagccctgtatttggtgttatcggtatgtacgtaagtagtgccgcattacatttccttatttcatccggaacaggagaatcggttatttttattccgatattagctccattagctgatttcatgcacattacacgccaagttacagtacaggctgttatgctcggcgagggtgtagtaaactgccttaatccaacttccggtgttttaatgggcgttctcgcagcgagcggcatttcttatggaaaatggattcgtttcatggctccacttgcactcatttggtttatcattggacttgtttttcttattgttggggtgaatattgagtggggaccttactaaatacttaactagataaataagtactatcgttccatataaatatctattctatttccctcactagtcctataaaaatcatttattctagtaaaaatataagaagggattgatcataatgatcaatcccttttatcaaaatataatacctttaaagatcttagttccagattttatttacccattcaggatgatcaataaaaggattgcggttatgttgatattttgtaaaaatcacttcattacgctttcgctctaaatcatcgaccgggtcttgttcattccattttaataaaacagatacagtctaagacagaaataataaaaatcaagatgatagctcgacttttcccttttccataactgtctttatttttgtgtaaaacctttttttctctgaataatacgtacaaaaatagattggataccatgtaggcaccaatctattttaattaaagaaactgtgtcaattctgagttcacaatacgttgtgcagtaatgataacactgtcagctgttagtccataaacactatatagtccaccaggttgattaggaacaatttgaacttcatattcaaatgcttgtccaaaagcaggatgaactaaacttagagttacaaaagtagaagcattagaattcacattgaagtttacctgttcaattaatactaatgaaccgtcaagtctaaaaactctagctactccagtaagtgggcccgcagtacggttaaggattttcaccctaactctatttgcattagcaggttgatttcctacgttttcaattggtcctgtagtaagagccatataacatcacctccattatattattatgatattcaacgataaacattaatgttatagtctaattacccaatctacttaaaataaaaagaagctccaaattctattatatttaggtcatagatattaaacttaataaaatcaaaggcaggagcatatttgatatgttcctgcctttttattgtgggataccgataaatagccctctagctaagattttaaagtgctacaaaatcaaaaattttatctcaccacagttttctacgagaatccagtgaacagcttatttacataatttttgttctcggaagttgattttgtagcgccctttctcgtaattcactatgttttccaaagaaaatagtgaaaaacagggcgatgaatacatttacaaaatgacaaaactgtaagaatacacgaatgtttgtaagaaagttcgatgttttcctttttctttttttattatagtgaaaaagaagaacgaaatattctcttatgtaggaaaggaagataataatgattgatctattaaataaatggatgttagaaagtacagccaattttaatatcgttgtaggacttacagcacttctatttttgggttcagtaattgcacttattattatttacaaaaaaattggtaaaccagatgaaagaacaaatgctatttatttaaaaattacttctcgtatgtttactactcaaattctaatgaatgctatatttatttctttagttggtaaagatattgagaatttccgtcaaatctttatattatttgaagcttttgtattctttattggagctatttattcgtttaaattatatagacaggagtacaaatagttgatccccatctaatttctttgcttccgctgaattttgaggtgagggtcttacttcccggcgaatagcgggataaaactagaacttcttttcctatgtatcattatttcgttacttcaccaaactgcgctctcgtcactttcgccaagtcctctactttaagctcaatttgtataccaattttcccgccactcactatcatcgtttcaagtgattgggcactttcatcaatacatgtagaaaatagctttttcattccaactggtgaacaaccgccgcgaatgtatcctgacactttcgtaatatctttaacaggaatcatttcaattttcttttcacttactgcttttgcggcagcttttaaatttagttcctcatctaccggaatgataaacacatgataatttttactattcccttgagcaattaacgttttatatacttctctcacttctcgtccaattttctcagctactgatacgccatcaatttttccatcgtctggatcatatgacatcatcgaatattcaattttttctttatctaatattcgcatcgcatttgttttatcttttttcataacgttctccttaaaaggttatttcatattattaagttttattatacacccttttccatttctcctacataacttcacgtatatttcaaaactaaaaatattgataattcaaaaatcatctgatataatttggaaaaacttatgttaaggagagatttgtcatgcgaaatgttaatacttctttccaacttcatcatcatacgtaacgccgtgtatccgaagaaaaatttttcttcgtgggtacagggcttttcctgttgacccacgaagcgttcataaagctatgtgggtatttttatacctgcatagctttttttaatttaaaaaaggagtgattatgatggaaatgagaaatgtaaaaggaacgaaagactatttaccagaggagcaagtgctgcgaaataaaattaaaagagcttgtgaagatacgtttggacgatacggatgcaaacctttagaaacgccgacgttaaatatgtatgagcttatgtcttacaagtacggcggtggtgatgaaatattaaaagaaatatatacacttcaagatcaaggaaaacgtgatattgccttacgatacgatttaactattccattcgcaaaagttgtggcaatgaacccgaacctccgcctcccttttaaacgttatgaaattgggaaagtatttcgagatgggccaattaaacaaggaagatttcgtgaatttatacaatgcgacgttgatattgtcggtgtagaatcagtcatggctgaagcggaactcatgagcatggcgtttgagctgttccgaacattaaacttagagatatcgatccaatataataaccgaaaattgttaaatggtattcttcaggccattaacatccctactgaattaacaaatgacgtcattttatcattagacaaaatcgaaaagattgggattgatggtgtacgaaaagatgtattagagcgcggaatttctgaagaaatggctgatacaatatgtaatactgtattatcttgtctaaagcttacaattgttgactttaaagaagctttcaataaccaactcgttgccgatggcgtaaacgaattgcaacaattacagcaatatttaatcgctctcggaataaatgaaaatacgatattcaatccgtttttagcaagaggactgacaatgtacacaggtactgtatatgaaatcttcctaaaagatggctcaattacatctagcataggtagcggcggccgttacgataacattatcggagcattccgtggtgatagtatgaactatccaacagtcggtatttcattcggtttagacgttatttatgcagcactatcgcagaaagaaacaatctcatctacagcggatctatttatcatcccgctcgggacagaattacaatgcttacaaattgcccagcaattacgttctaccacttccttaaaaatcgaactcgaactagcaggacgcaaattaaaacgtgcccttaattatgccaataaagagaatatcccttatgtgcttattattggtgaagaagaacttagtacaaacactgttgtgctgcggaatatgaaggaaggtagtgagatgaaggttccgcttacttctttgaaaaataatacattgaataaatattttactacgcctactacgttatgactgtgaagtattctcaaaatgtaaatcaggtaaacaaaaaagggctgtccgcgcatgacagcccttttcccttaatgaacaacaccttcataagtgaaattatattaacgattttccgaatatatctatcataatttacactatatcaacgatacatagatttttcatttgatagataaccgggcaattagtttacataaaataattatactcaatttaatcttacaaaactttaacatccaattacctattttaataatatatggttttctaatttcactaccaatttaagaaaaattcatatccttctctactataccactttcatctattaacttttattttgtgcattcctactctccaaaactttctccatattatgagttgcccattccatcattaatagaatcattggacgaagtgattcaccaagctcggttaacgaatattctactttaggtggcacttcacggtatacttcacgatgtatgatgccatctgcttcaagttctctaagctgcagtgttaacattctttgtgtgatattaggttttaatctttttaattcattaaacctctttttcccatctaataaatgatacaaaataacacctttccattttccaccaatcacctcaaccatagcttcaactggacaagaatatttatttaaaaatgggtaatttatattattttcatttgaacaatccataataaatcccttcccttaacattagtatcttttttgatactataccacataaatgtgcgtacttgtatctatgttactttaaaaatataatttacttacaaaataaattaaagaaaagaggaacttttatgacaaatacaaacgaaattacaaaagagaaaattatggaggcttttcatttcagacatgcatgtaaagagttcgatcctatgcacaaaatttcagaagaggattttaaattcattttagaaacaggcagattatctccttcttcttttggatatgaaccttggaaatttattgtcgtacaaaataaagaattaagagaaaaactacaaccgtattcatggggcgctggtgggcaacttgcaacagcaagccatttcgtcattgttctttcaagaaacattaaagatatgcattatgatgcagagtatattaaatatatgatgaacgatattattggattgcctgaagacactcaaaaaattagatatgaattcttcaaaaagttccaggaaacagattttaacttattacaatccgatcgtactgtatttgattgggcatctaaacaaacttatattgctttaggtaatatgatgacgagcgcagctcaaatcggtattgattcttgtccgatagaaggattcgataaagagaaagtagactctttacttcgtcaagaaggcattatacagggcgataactttgaagtatctgttatggttgcctttggttaccgtaaagaagatccaaaacgtgataaaacaagacagactatagatacaattgttgaatggattaagtaatgtagcacacacaaataatgctcctaatagctggatacttatactaaagaactattagtcgtttttcttatgtatgaatttggtttttcatggaaagatatattagtatgtatgcagtttgagcactctattttttagagtcgaacaggaggagaatgaatatgtctgatattgaagttggcgaagtgtttactcttagtgatgagaataacgaagagcaagaagtagaagtacttggagcgatggatgtcgaaggcgcagaatatattgcagttgcctttgttgaagatatccaaacagaaactgaggaagacattgatattttctttttaaaagtagaagaagataatgagttttcatacattgaaaatgatgaagagtttgataaagtatctgctgcgtttgaaaagattttggatgagcaagagcaagaatagtatgaatgaaaaacacgagggcggatgcatatccgccctctttttattactcatccagagactcacgcagtaattgcagtacatctttcatcgcaaaaggtccatcttttttaacatgctccgcaaattctgaaacgagacgtaatgttctcacactttcgattggatgttctcctgatgcactttcagctgaaagcataactgcattcgtcccgtccagtacagcttgaaacacatcagtcacctcagcccttgttggaatagaatgatctaccatagattgaagcatttgtgttgctgtaatgacatatgtattcgttcgattacattcctgaatcatcattttctgtaaaagcggaatgcattgatacggtaactctactcctaaatcgccccttgcaatcataattccatctgcttctttacatatatcctgaaaattctcgattgcttccatcgtttctatttttgcaattatattaggtgacgtttctttatactgttgtataaaatctcgtatttcttttatatgactaggttttcttacgaaagaacatgcgataaaatcaacattctcctctaaaagaaactgaatatcttttttatctttctctgtaatagctggtaaacgaacagccgcacctggtaaattaactcctttatgagatgagatattgccacctgtttttaccttcgtttctattttgtccgtacttatcttttcaacaattaattcaacttctccatcattaattaaaattctactgcctactttcacatcattcggtattccttcataatcaacactcgcttctgtattactccctgtaactggttgtgtatgtaaaataaaagaatctcctgcctgaagtgtaatttgctctcccttcacttcacctaatcttattttaggtccttgtacatcacccaaaaatttaatagagtcatctaatgatttcactaaacgaatgatgtctttatgactttcatgcgtgccatgcgataaattcagtcgaataattttcataccattctttattaactgtgctaatgtttctttattattacttgcgggtccaattgtacaaattcgatcgattgtcatttttgtcaccatcctttttttaataagtttcccatatgaacttaaaaataacagagattctgacatgaatagatttaaatttacatgaatttcataaaattaaacctgtatcccttgctggctaagcattagaagatatattcgcttttttgcaaatgaagacatgttgaatcgaaagtaaaagaaaagttaagtatgggataaaccattgagagtttcgaaattttcatatattgtatgaattgagttcgaactcaaaaatttaaaaaggtgggaaaattagtgaatatgaaaaaatctttatcggtgacaactttagggttagcggttttaggttttggttttactaataacgcaagtgcttcagagatcgatactgtagacaagcagcccgttttagttgactttgatacaattcaatcaacaaaaacatctagtgttcctagtttgactattgcagctgcacctaagaatgactctaacattagcgtatatactcccttttttggtaacccatatgcagttgctaaatcgacatcaactacgaccgaagactatgtttatgcaaaagcaagaactttcaatggcgatagctcattagtaaatacgaaaagtaatagtgcaaaaaaatcatcctttgtaagtgctacagcgaccaacacaagcatttattatggagatgattacgctatcggtaatcatacctataaattaagtggttataatgatgtgaatcacgaaacaaaagctttctggtaagaaagagaaaaaagatatgcatcttgcatatcttttttctctaatattttacatatattgaggtgctatttatgaaacaaatatatattattagcggtgttttacttatttcattacttacaatttatattttgttcaatacttcaatcatacaacctcatccaccttccatagaaaataaacgcgagcaacaaaccaatactatttcttacggattgaaggataatcaaggccaacatattaacaatggcagtacaattactagtgaggataataaaattaatgtaacattatcattcgtacatactattaatgaaaaccgaaaatatggattaattgttctagaagattacgaacaaaaaccttttaaaatagaagatactactaatgaaatatcacactatttttttgatatgaaaccaaacagttcaatgactacgaaaatctctttacacacttctcctaatgcaagtgcattaacctttttaataataaaaaaacctgaatacaaattaaaagataataacttaaataaagcagctattttagaagatattctaagtatgcgatattcaatgcatcctcttcagaaagaaaacgaaaaaataaaactcccccttatagatccagatgctattttaaaagatggtctttacgaaccagtatttgttacgaaccgtgaagagaacttacaaactgtcttctttgaaaaggaaggcaagcaattaattttatcaaacggtaatgaaacaaatgatgaaatgacttacgcaatcgtggcttttaaagattggaaacaagttgaaatatttagcaatagaaaagtcgtttatactaaggttgcacctgaaacaagacaaatctttaatttcacattgccttcagtggatcaagaaagtaattttcaactcgtcgcttttccatttccttataaagttagcgaagaagattatgtcagtcaacaagcattcagttcctttcgcatcgtaattgaaaatgaaaataaataagttatactgtgcacattacaacaacctaaaaaaggcctactcacacgagtaggcttttgaaactatgaaagtttcgtcaataactgatttaaatcttttttcgttttcgtcgttaatgatttcattttattaacatcaatcttttccttctccgcccctacaattaacggatacatactttgaccgattgttttagaatccgtcggatgtgatgcttctagctctttttcaatcacatcccacttttcgttaatttgtttgccaagcttattcactgtttccaatttcggattagcagctaactgcttgtccaagctatcaattaatgctacaacttctttaacattcgttttcacagcaacacttttcttcggatctttcgttgcctttccgttattgtttgtgcttgtacttgtgctttgatctgctgttttcccgctagtcgtttgatcattcgtttttcctgtcgtttctttttcttttgtttttacattttcgttttgagttgacgttttgccgttactttctgttcctgatgattctttcgtattttttgcatccttatctgttttttcatttgaagaagtatttgtttctttttcagtatctttcgttgtttttgaagcttcatctgcacttgtcgtttttgcttctccatccttttgcgcagttacttgctctttcttttccgtttctttatctgctgaaggactacaagctgccatagtaagcattgtaccaattgtaatcgatgcgatagcgacctttttcattttcatataaatccccctatgttttacataatttatcctcccctttacgattcgattcccccttaaaaaatcccttttcatacgaattatcatctttccgacagtaatcttcataataatacgtacaaaaactgataaactcattttaatattcgagtttcttctacttcatttttctgctcacaagtaaaagaaaaagagtatattgtcacattaagaattactatcttcatatgacaatatactcttctatcaaatttttatctttcttgacattttatttatacaaaaaaataaaattttctttcgttttttgtttctcaacatttgttaacataatatttttatgaataaccaccattcgagtgaatgacttgcccagtaacccatttcgcttcttcacttactaaaaaagaaattaagcgcgcagcatccaccggttctcctactttaccttgcgggaatttccatactaaatgatgcttcagctcctctgtaatccatcctgtattcgtcggtcctggatctacagcattcactgtaatccccttctccattgcaactggtgctactgactttgtaaatgcttcaattgcccctttcgttgctgcatatgctagttcatctggcattgggcctactgactgtcctgaagtaagattaataatactcccgcccgttttaagtgaataatgttttataaacattgaacttaatagcatagtagcccgaacattaactgtataatgtttatccaactgctctacatctaattcctcaatcctcgtatgattagaatacactgcattattaactagaatagatggatcacctaaccgttctgataccatataaaacaaacgatttggcgaataagactgcgataaattgatttctgccatttcacatcgaacatcgtaactttcaatttcctttttcagcaaaaagggttcttgatcactcattccccatggcatcgctttatcatactttggccagtacgtgaaaaaaatgtctatccccttttgagcaagcaccttgcatacagctgcaccaattccattcagacgagttgcccctgttacaattgctattttcttcacctttttctcctccatctatacacagatcccctgcatgaatacagaggatctatcttcttattgaatatttgacagtatacgttcagcacctaattttaacattttaataaagatataatttacaatcgtaaacattacaaataaaacgataaacataacccacagtccgacatgaaggaagaagtataatacacttactccccccacaataattaaagctattaaaatattagctaaaaaattccacaaagttgtatatcgacttttaaataatttctgctctgtatcccaatgaatatctgcagtttgtgcgtcccagcgtgttccgattaaattaattaataacaacccgttcgcacttagtaaaaaccacagtatcataaagactggagaaatcccagctacaactgccatcgtaataccgaatactgctaaaatgatcacattaattaaccaagcagtgattgctttcgcaaaaaagatatccgaagcctttactggtaaataacgattcacaaaccaagagcttccatctcgcgaaaatgacgttgttgcaatgacgttactacccattaaaaataacgatgcacaaaggccaacaccaattgcaaatcccgttgtctctggattgttaatatactctgtaataaactttaaatttccatcttgcacaaataaaataaagaacaacataattggcataacgaaagtttgtacaatgcaatttaagaaaaattgtggtgtacggaataacgttttaaattcttttttcacatacgcttttaaatgcgaactttgtactgttgatttctgtaaaccttccgccgaaataacttgtttctttgctgtactcgtcgaaagtccaataaccccttttaaatatgtacgctctgctatgtaataaaacaacacaaagaagacaaatgaaataactgcaaagattattacatataaaggtcccttccaatttgcattttctactaatgccactgctccaaaatatgtagttggaaaatagtttgtcatttgtactaaaagagaagactggttgtttgcaaggtaatccgcaattgcatcttcagaaaacgaacttttatttttccactgcaaaaatacgttaattcctacaataaatagtatacttacgattccaataaatatatttcctcggtctttatttttcgctatatttgtatacctcataataactgtcatcagtaacgaagctagtactaacggcacaattgggaagagtaagtaaatgaaaatcatatatatgtaatatgtaataaatgcgccactttttaaaccgtacgtaataaagatcggtaataaaataaatgaactcattacgtattgtgtaattaatactgttaaaaatttggctgaaataatttgcgctggttttaatggtaatggtaataacatttcaatgtcattgctgtagtaaaatacagttaaaatgttcgtaatactcattaaaaatacccatatactcgcaatcgcaagtcccattgcgataatcattcctggatcttgccctaaatgtatcattccctcatacattgcatgcgtgatagaaccaaacagtaaaaagccgacaaataaaatagctgcaaatgaaaatacatacgcccatcgcttcttcttatctgttataaaatctgcataatttaatttcaataataccttcgttaacgtccaaattttactcattgcccgtcatctccaagaacattttttcaagtgattcattggatttaaaatgatctctcatttcatctaaatttcctttaaactgtaaattccccttattaataatagcaacccggtcacatattttttccgctacttctaatacgtgtgtagagaaaaatacaatctttcctttatccgcatgctctctcatcatttcttttaaaatatatgcagatttcggatcaagcccagttaatggttcatctaaaatccatacatctggctcatgtacgagcacaccaataataacgattttttgtctcataccgtgcgaataactttgaatttgatcagataaagcattataaagatcaaacttcttcgctaaagactctattcgttcttgtcgtacttctttcggcacttcatacatatcggccataaagtttaaatattcaattccttttaatcgtaaaaacatatctggactatctggtacataaccaaacgtcttcttcgcttccatcggctcttccataatattttttccgttaatcgtaatagtccctttgtccaccccgtgaatgccagtaatcatcttaattgtcgttgatttacccgcaccattcggtcctaaaaatccaaagatttcgccgctaggtacagataaacttaagtcttttactgcataggtagacccattataactttttgacacattcgtaatttcaatcattccatccaatcctttccttaattaccaaataactatattgatattatagcatagttctattttaatatttttacatttttcagtttatttaacctttaaaataaatatacacccctaatccaacaactaaaacgacagctagtataatataaatcattgttaagcgtttaatattcccctttgtcgctttgctataatttgcatcaccattccgcccaattaacaccgtcgcaatgacagtaatcactacaagtaatacaacgatcatgatccaagttagcatttcttcctccccctccttacaaccattttacaatattatcctctttatttcgcagcatatttcctctttttactattattatgaagcaaactggaaaactattattaccattcctatccaattgcgatatatttataacataacgtgacttatttctaacaacataaggaggacctatcatgaaaacaacttggataaaatatttaggatttctcggtttcttcggatttttttatgaaaaaggattgtttactatgttctgtttcttctcctttttcacatcgtatagaacagttcaacacgatgaactgtttgaacaaattgtcaataaatcgtgtcgcaatgcatttatcgttacgttactaactaccacaatcattatgtttattgaaatgttatttccaaaccctacgctacaagagattgatatcgctcttattttcggcacactcattcttacattcggcttttctatgttctttttcgataaaccaattgatgaaatggaagatgcaccatggcgttcgtaacgagaataaaagaataccgtgccaaattgaacatgacacaagaagatttagcgaagagcgttggtgtgcgacgtgaaacaattagtcatctcgaaaaaggtaaatacaacccttccttacaacttgctcacgatatagcgaaggcattacatagtacgattgatgagatttttatttttgaggattgattaaagacgtccagtcacaagaatcacataaaaaaataccgtcattctttccaagaagaatgacggtatttctcattgattatccatataaaaccgcatgaaatacgcctaatagcaagtattgatcctgcatgtaatcttcatcatatacattcatctcaatgtaatacatatcttcctcaagacgaatattccaatctgcaattacatagccctttcgtaataactttcccattccaaatgaagttttatgaacaacatattcttctgccttatatgtaaaggtaaataagaaatttgcatccaataactttccgtcacatacaagtatttcatgctctgcatcatgattatctttgtacgttactaaaatccttctttggcgctgcctacttacatcctttgcaatgacgcgaatattgtccttactatcctttatttcataaataatattaccaccaatttttggaatgaaatccagcactctcatcagcgtatttttataatagccccttactacgcctacttgctcacttccattataaacctctatcggtgtcgtatctgctttgctatcacacggtcgtttgtaagagagctgcatcattcgctctcctcttaagtactgatcaaacgtcacaggatattctatcatgcgcagttctttatttagctcatacaaatagcgttgaacactctctattaatgttgtagtagctatacgctcttgaagttcaaattcttgccagctggaaaaaacattccattgattatgatcctcttcatagaagaaaccaagaattacctcttcacggtcagccgtttcatatttcataggcacgttctgcccatgttgaacttgttccatccactgacctaaataaatgcccagctctgcaaccttcatacatgatttttgaaaaaatacgctgtcactcgcgcaaatcgttacatctccttcgataaagccctttgaataagcatcataccgtggctcatccttctgcgggatactcttatctaactcaaataaaaacgttaacatcctttattcacctctagttgttacactaatcatacatgacatcgcatcactctgagagactatttatatacgcatatttaattcacgcattataacacgtgaatgatcttgtatagtagcgctattttttgttctatatcttagtatatgaatttatatgagcgatttttcaaatatatctatcacaacttacaatatatcaacgatttttcaaatatatcgatttttcgacaaatatcagcacaattaaaatgaaactaccttttcttcagccacttctacaatttctaaaatttgtagcagactctccacttcataagtcggattaacactcgtcttattctctttcaaactcggattataccaacacgtatcaatgccgaagtcttctccgcctttcatatcagaagttagcgaatctccgaccattagtacacttgatttatccgtaattccaaatttctcaaatgcataatcaaaaatctcacgcgctggtttttgatgaccaacttcttcagaaataataatgtgatcaaagaaattacataaaggcgaatttccgattcttgattgttgcaccttcgtatatccattcgtaataatacctaacttgcaatcttgaagattttcacataattgtactgcgccttctataagatgtacctcttttcctaagttttcaagatatacatcactaaattgctgtgcatctacttttatattatgaagggcaaataattgtctaaatcgatctactgctaattcacttagcgtaatcattttattttctagatctctccataatccattactaatctctttataacttgcaagataatcattataccctgtaggcataccaaactgtacaaacgcattatgtaatgcgtgtctttctgtttcagggaaatctaataatgtatcgtctacgtcgaataatataaatttgtatttcatgatgttctcctcaattcctattttaaaagcttcgttctcattgcttataagtttttatatatgtcgtgatgaagcgctttaacccgctctttatagaatacacctttatcttttattttcaaatgtgctataaataagtttgctagcatgactgctgtatctagtctataaaataaactaacaatatgaggagtaacattaaagatactatcattcttatatccatctttaaattcatcccaactaacctcatttgtttcagctattctcataagctccagcaatggatgaccaattaaagcattatcccaatcaactattgctttaacttctccattatatccgattaaattggctggtcgaatgtccatatgtaataaacattttacatgatctgctgtactaagaatatattcaattgtttttgtatccggaagattaattttgcagttcgtgattgtattaaacccttctatccgtttcacaattcgttctgctatatacttactaatgggctctctaatattttgtttgtaatacaaaccatcaattggcatactatgaagattgctcactaactcccctattttgcatgcggaaattggcatatgatcagcatacacacaatccgaaattaaaaaatcaagttcggttgaaagatgcaatccgtgtatccttggtactggaataccttttgaatgacaatacttagacagctccgcttccttttgcaacgaaatccgactgttaaataagtcttcatttatattttccacttctctttcccacggtactcgaaatgccaaagaccccttttctgaatctccttgaaaaacaatattttgcactcccgttccaatcacctttaaatcttgaatagctagttccttatactcttgacttagtattgttgccagcttttctcttatcccctctgcttttacacgtgtatgaatcattttattccccgattcttaagctcttttcatccattttctcctcggtgcacaacatcctcattaacaaaattatagcaacaatagtaaaaggaggctaatccgctcagcctccttctcattattaatcttctagcaataactctttcatttcctctaacgactctttcgtaaagccaagagctttttcagcgtatgcttcaactgatccgtattgcttttgaatttcaccaatcgcagcttgcaagtattcagcacgtgcttcaaacattgcacctaatatcgctctgctctcatcgttttgtaatttcgcacctaaaaaggccatcattttttcatttagcttttcacggaatccgttacttagtaagtagtcttccattactgttttttctggtacacctagtaaaagtagtaataatgctgaaccaaatccagtacgatcttttccagctgtacagtggtttactaacggtaagttttccgggttttgcgctaagtttaagaagctcacgaatgcttcattaccacttacgaaatcttgattcattttcacaagatactcacctggttttcctaacatagaaaggtcaccaacttggaaaaactcatttatatttaagtctttcgctaagtcttgcataactggtaagcacacttgacgagcacctgtaatttctggattcggcttatgcttcacttcaaagtctgtacggtaatcgcaaattaactttaaaccagacttttgtaaataggcaatatcccattcagttagccctgctaattcttcagagcggtataatttgccccattttactttacggccttcagtcgtttcatatcctcccatatcacggaagttaaacgcaccttgtaatggcaatctacgctcggctactgttactgcttgtccattacttcctactaatctaaaatatggacgttcattttcactggggttttcaattgtatatgataattccccatttactgttgcaagtaattctccattttcttcaatatgatctggtgaagtactccaataaatacgaacttcttctatattattttcccactttatttgtaacgtattatctttatttctttctacagttgcttgtaaccaatttctttgctgtcccattctttcaccaacgctttctcatataatcgaatctcactctattgtattatacaaatatctactttgtcgttctcatttttctttttatcttacaaacaggcgaaaagttcttttacttgttcaaaatttgtacaaggattaccgcgaaatacgtatgcgatttgttcattacctaaatcttcgtatacaactgttccgcgattagggtgcggataaaactctaacccgtttataatttgttttgggccatagttcattgtccatgaagaaataggataatacgctttgtttttatgtctacaaacccaaagtgcatatagtttattaacttcgtcccagtatacatactgcgtttcgtcatttccgaaaccgaccgattcaagtttccaatttagtttttcatgaattaacaaatttacataggatacgtcatctggagcattccactctctacatcttcctatctcaccaattccatctctttttgcttgaaagctcaataggtgaaatggtgtatgtaatatcattttcgcaaactccatatttactggttgtaacccgaatagaaatctttccatttcatctttgtttacatacccacgatcaatagaaatttcaacttgtgttttccatatagatgtaacgtaactttcttttcctttataatttatacctttccaatacacaagccctttatattgaaaacaatctccttttgcttgagaaatacagctatccggaaatactggttccattatatcgagaaaaaattcctttactcgaaacatcccagttggagtaacaacctgaaaccaaaaagttccccacttttcaccttcataacgttctgaaactttttcaacattccagccttctaacaatacatttggatacaataacacgaatgaatgcatggattgctttaacatatatagtcccctcccgctatacgagttcgagagtatacatcattcatcctcctaaaactttctcacatatctctcagttgaactaagcagctgacatccattcttttcaaaaacatccttcatccattcattttgtatatttgtctcaccaatataataagatgcacctatttcctttaagacaaacatcgcagctgcaaataatgccgcttcatatcccttattacgcatatttggagtaactgcgaagtacataagtttcccttcttctaacgtacctctttcaatatgcgggattacaattcctatcggctcttcatcgacactcgctgttaagcaatgttctttccattgctcaccaatttcttgtagcatcatatgcacaaattgatcatgagcgactggttctcccgtcgcttcattccacagtgaataaaaagcctcttctccaacttcttcaataagcttaaaatcaatttcactttctgcatcttctacttcatatatatctttaaatacaatcatgttttccgtaacatattcaaatgaatacgtttcaaaacattttttatacacatcataatttggactttttgaagagatttcaaaatgtagtttttctaatccatcttttttagcttcagcaacgcaatattgcatcatttcctctaattgctcttctgtaaaaatctctgcattattttcttttatcataatagaagaagcatttcttcttattttaaaatatttttctaactgttctatcgtcgtcatattcttccctcatctatatcatactcgaatttctaatcgttctccttgcatgagcaggattgtccttgaatatatagaatactagaaaagatcgcatctttaaagtgcggaggaggttctccagtggatattacagcattgcaacaacagttagagcttatacaacaaaatgactatacgcaactacagcatatagacgtaaatgagttaactttgaacatgcttcagtatatcggaacgactgatagctacgttcgttaccaacttatatataaatgttttgcgcatttcattcatcatgaattccttatggatgatcagctgaaattacttctgcaaacttgtttaagtgatgagtatttatattgtgacatttactccccacattcagatggggttttcacacgttcttacactatttcgttaattgcgttaatactccaatttgctaattcgcactacttttgtacagaggaggatatcgaagaaataaaaaacaaactcattacatacacaaacttagaaacggattttcggggctatatcgaaaataaaggatgggctcattgtcttgctcacgtatctgatgcctttactgaaattgttcataatacgtatacaacttttgaatggtacgaagaattaattcattgtttattaaataaaatctttattccatctgacctttttcataataacgaagatgaacgcattgttactccattactagcaatgctgtatcatgattttcctcaaaacgagttaatttctattattcataaaaaaataaaaaggcttcctcaaattagaaaacgcctttcgcttaatgagtattgtattttatgtgccaatattaaaacctttttacgcacattatttttcagaacgaaagatgaccataacttagcctttacagcacgtaaaacagaaagaatgttaaaagaacttcctaactattattaaatacaaggagcaatgacatgggttatattgaagatatgagaaatctagtaggaaatcatccacttattttaataggatcacacgccattatattaaatgaaaaagatgaagtattgctgcagctccgtacagattttaaacgctggggcattattggaggcgcattagaatataacgaaacgttagaagaagctttaaaacgagaagtatatgaagaaactggacttatcattaaaaatccagaactattccgtacatactcagggcctgatttctttcaaatctatccaaacggcgatcaagtacacggtgtactcgttgtttatatttgccgagaattttatggtgaatttgtatgcgatcaaagtgaatcaaaagaactacgcttcttttcacttgatgaattacctaataatcttccccctgttattgagaggattattacagattatcaaaaaaaataagggaacgcttaacgttccctctcaaatccaatccgttttttaatttccgctaaatttacctttgcaatagcgcgtgccttctcagcaccgttttctaatgcttcatataataaatccggctcattcatatacattgcgtacttttcacgaggtccagctaactctcgatctacaacgcgaaacaactctttttttacatcgccccatccgattccagtctcatatttttcacgtaatgactgtatttcgtcttctgtcgcaaattctttataaattgtaaataaggtttctagttctttcggttcatttggaagtgaagaatctgttttgattttaaatattaactttcgtagtttttcttgctctgcaaataatgggattacatttccgtaacttttactcatcttccttccgtcaagaccaggtaaaatagctccttcttcttgtatgacatactccggaagtgtaaatgtcgtgccaaatgtatgattaaaatacgtcgcaatatcacgcgcgatttcaatatgctgaatttggtcttttccaactggtacatgggtagcttgaaataataatatgtcagctgccattaaaatcggatacgtatataaccccatattcactcctgcatcgacctctaaccccgcttctttattttgctccaccttcgctttatacgcatgagcacggttcataagacctttcggagttaggcaagctaaaatccaagctaattctagaatttctggtacttctgtttgccgataaaaaacaacatcttccccaagtccaagcgataaccaagtagctgctacctctttcgtataactgctgaacttttctgaatcatgcacagcatttaatgcatgataatcagctataaagtacaatgcttttccttcattattctttgacatttgtaatgcaggtttaatcgcaccaatataattccctaaatgcggataacctgtcggcttaattcctgttaacattattttttcactcacactaactcctcctttcgcaaaataaaaagagcccctcatccttaaaaaggacgagagactcccgcggtaccaccttaattagctatcattagctcacttcatacttcaataacgtgaagtaactgtctttacctactcatttcagttagaagctccagagtccattccatattcatcccttactgattctcaccacatatcagctctctgaaaagtttcgaatatgtactcttctctttcattgctttttcgttattttttacagtttatcacatttcacttccaaacaaacccgaattttctattttatatagcaggaatttccacttcaattgtctaatattatataggtttgcagaaatattcgaaacaactttggaggttttttcatggtaaaatatatatccattttaggttccacaggatccatcggcacatctgcattagatgtcgtttcagctcatcctgaacatttcaaaatcgtcggtttaaccgcaaattataatatcgatcttcttgagcaacaaatcaaaacgtttcaacctcgtattgtaagcgttgcaacaaaagacttagcagacacgcttcgtacgcgtatttcagcgaatacaaaaatcacatacggaactgatggcttaattgcggtagctactcaccctgattcaaatcttgtattaagttctgttgtcggagtttccggactacttccaacgattgaagcattaaaggcgaagaaagatattgccatcgctaataaagaaacgttagttgcagctggacatatcgtaactgaactagcgaaacaaaacggatgtcgcttaattccagtagatagcgaacattcagctattttccaatgtttaaacggagaaaataataaagaaattgagaaattaatcgttacagcttctggcggtgcattccgtgataaaacacgtgatgaaatgcaaacattacaagcaaaagatgctttaaagcacccaaactggttaatgggcgcaaaactaacgattgattctgccacattaatgaataaagggttcgaagtaatggaagcgagatggctatttgatattccatatgaaaaaattgatgtaatgattcataaagaaagtatcattcattctttagtagaatttattgatggatcagttatggcacagctcggtgctcctgatatgagaatgccgattcaatatgcgtttcactatcctactcggctaccttcttcctatgaaaaattaaatttattagaaatcggtagtttacattttgaaaaaccagatttagagaagttcccttgtctacaatacgcatatgaatgtggcaaaatcggtggtactactcccgctgtattaaatgcagcaaatgaacttgcgaatgcactattcttaaaaaatgaaattgcctttttcgatattgaaaaaacaatttacaaaacagttgaagctcatcataacgtaaaagatccttcactagatgctatattagaagcggatcaatgggcgcgccaatatgcaaatgaattgttaataaaaaagcgctaaaacagttcccactgttttagcgctttttttcacgtattcaacttaacaaatctataaccgtgtgtaactaacacttttaatatcgcataccctggaatcgctaaaataatccccataatcccgaataagtttccggcagttaaaatgataaaaatgatagtaatcgggtgaatatctaactttttacccatgacttgcggagaaataaatttaccttctgctaattgtacaaccatcataacgatgattacttttaacaccattgctggcgagtcgataaatgcgataattaacgctggtgtaatggcgataattggtcctacgtacggaacgatatttacaatcatcgctaaaatagcaagcagtacagcatatttaataccgataataaggtaaccgattaataacataataccgataaataagctcacgataatttgacctctaatatacgagctaatcgcataatgcatatcatctagtattctcattgctgctggttgtctttgctctgaaataaactttaaaaagtgattcggcaattgctcaccatcttttaaaagatagaacaatataaatggaaccattacaaatgttaaaacaacctctgtaacagtactcaaaaatccagttacattcccagttactgatgataatgactttgtaaaatcaactgtgtattcttttaccatattcgcaacattaatatttaaattctcttgaattttaccgagtaaattactttccccgaatctacgtgctgcttgttcaatctcatggccaaaatacggtaagttatcaattaatgcatcaatttgatctttaataatagggataaccgttacaactaaaaatacaaataatcctagtacgattaaatatatggaagctatcgatacgattcttgaaacacctttcttttctaaaagcgaaacgaatggatgtaaaatatagaatagtacgcctgctaatagtactgggaagaaaattgtttttaaaaatacgataaacggtgtaaaaacaaatgatatttttgttagcaataaaatattaatgaacaataacgcaaatccaagtaataccgccaaataattttgttctctaaaaaactttcttaacttatctctttttcttatatttattttctccaatgaaaccacctcttcgaatgatgaaaagcccttattcagggctcttcatcataatctatatatctatttctttgcagctttcactacaaatgatacaataaaaattaacacgattgcacctaataatgctggcacgacgtgaatcccaccaaatgatggcccaaaggagccaaataatctaccacctaacgaagcacctaataaacctgcgataatatttccgaacataccacctgggaaatttttacctgttatagaactagcaattgcacctataatagcaccaactattaatgtgataatccaccccatttttagtcctccatttctattatagtttgtatgatttaatacaaacatatgtatttatcattgctaaccatatttcactatagaaatatatttactactattttacatatggagatacatatattatatgcaaaaaagaaaaatattgtcaaactcacccataaagcaattatattcatataccatatttaaaggaggcttcattatctatgattcttaagttaaattccacttcttttgaagtagcaacatccattttacaggttcaaattccagcttataaagttgaagcaggctacttaaatagtactgccatacctcgtttatatgatactgtaaacgatattcaaaattgcgttgaaacattctatggatatttttctgaaaataaacttgtcggttttatttcttttgtacaagaagaaaaactaatcgatatccacaggctagttgtatcgcccgatttttttcaaaaaggaatcgcaacgaaactcctaatttatatatttaacatgtttccctcttcaatgacatacattgtacaaacaggtaaagcgaatacccctgctattactttatataaaaaacacggattcattacagtatcagatacaatacttcctgacggtatgattcttacgcaattaaaaaagacagaatacacaaaataatttgacttgttcgctcctttatgttattttttactttataaaaccttttgctgagtccaaattttggagcgggggaaccatttttgtagctatgctacttggggcgaatcttttttaagtagggaaactctcacttcccgagtccgacagctaacctcgtaagcgtaatgggagaggaaggtgctttttgcctatgttacacattttgcctccttaattataaatatgggatcgatatcaaatagtcacctatatttatagaaaaggagaatgtattatgttacgtttatctgatcacgcaataaaaatgatggagcaaagactccgaattgaaaaacaacgcacatatcaagcaaataaagttgtagataacttacatcacaaatacttctttcagcatattttccaaccgaaaagatgaagaaaatgtttatttaatattaaaaaacacaaggtgtgtcttacaaagactttccttgtgttttttatattctttataaaattctcactatatttaagcttgctgtaatcgcacctgctatagtagtcacatgccctacacctaacgggccattttgtaatattaatgttgaattggcactcgtcacattcacaagaagtgtatttgaaatggctggttcgattactacagttgatgtcgttacgttttgtataaaactccctgttagttgcgttccatttaatagcaatctaacagatactgtctcattcctaccattggcatccccttgaaaatattacaccttttatatgaaatgcatttttataagaaaagtacacctttgacctcatttttttaaaataaagaagcctatcatttcatctatttgaaatgataggcttctttttataaaacaatttacttcctcgccttaataataaaagtagttggcaccatcctagctttatataaagaataatatttcgtagacggctcagctagttctccatcaagcgagctcgatggttcaggctcttctattctctcaattttaaatcccgctctatttaactcatttatgtatgtacttatttttctcttatgtaatgtcgcttgtacattttctcctttaaaagtttcaaacgtaatgggcgtttcctcatgataagaagactttatagcaacttcttccgtaccatactgtaagtttgaatatactgggtgctcccaactaaaaataaaacttccccctggctttacatatgaataaatcagttccaacgtttttcttaaatctgaagtccaacctaatgcataaatggaatatacaatatcaaaatatcctttcggaatatctccttcttcttccattgctccgcatactaactttggattccaatcctttaacgtcttattcgctatttcaatttgtgtactcgaaagatcaagcccccataattcctctgccccttgttccgccatatattgcaacgaatgcccacttccacagccaatatcaagaacctttttctttctgattgaatcgaacaaacgaatctcatcttcagacgccgtatacggaccatatttaggtaaacaatccacttgaaagaaataaggtgcaactgtatcccaacactttttatttgtagctagcatttgtgtgcctttcatattattcattcccccatccatttttctttctctaatattacttacatatcataaccagatcgcccttttctcttcgccctgtagtttttcactttcgcaatcgtaccgcatgctcttcctccttcttctccagcatacataccgcaccatcttttacttccatttcgcgaatgatcataaaatacccagcgacaatctggacatgcttttaaccttccccacacattttcttgaattgacattaacacaatgcttaacacttttgtatacacattctcttcatatactggttcatatgtaatacctttcatatcatcctttatatgtacatgaaatgggtatttctctaaccatttttgcaatgattcttcgccttcaattgtcatccgaatatcttctcgaaaacctcttaattcctctatcgtatgaaatggaaactcttcatcaaaatattctttcataaagagctttatatcttcttttgtttgcagcaaatcaattggctctctcgtatcgtttggtattctccatgtatttaaaaattcccgaatatattctagttcatttggagcgttttgattcaattcaatccaccttcttcttaaaatttacttttttctgactttatgtataattataatataaagtagttaaccatcaaataattttactggttacataattaggaggatttctatgaaaagtttctcaacaccgatacgtttcatgcttatttcttcattttttatgtcttttgggtattttgcagtatacgcatttttagctatttatctattaacctttcttcatttttctgctgtccaagtaggaacagtgttgacgattatgacaattacatcacgagttatcccattattctcagggttaattgctgacaaaataggctatatcattatgatgatagccggattatttttaagaggagtcggatttatcgctttaggaatatgctctgatttctatacaatttctattttttctgcacttattggcttcggaactgcattttacgaacctgccgctcgcgctatatttggctcacagccagctcatttgagaaaaaatttatttacatatttaaaccttagctttaattgcggtgcaataatcggaccaattgcaggaggattcttactcttactcgatccactctacgctttctctctaacaggatctcttatgctgttatttgcttttattttttacttacttaaaaatcacttccaagtcactactgaaaacacgtctattacattaggaatacaggtcatcttacaaaacaaatctttccttctgttttcctttatcatgattttcttctatattatgtttactcagcttactgtcgcacttccacttcatatgaaaaacattagtaatagcaatcaacttgctacactcgttattacgataaatgcgataacaggcgtcatatttatggtattattccgaaaattattccacaaatacaacacactttcgattattaaatacggtgttttattaatgagtatttcctttttactcattcctttatttcaacacccatattggttctttatttgtgtaattttatttacaatcggtgaaacactcgtattacctaacgctgatatcgctattgcaaattacagtaatgaatcatatacagccactttcttcggattttatcaactatcactcgcatttggttttatcattggtaattataccggtacatcttttacatccaacttaagcggaatgtatacaccatggcttatttttggcggaataggacttattggttttatttcactacatattttgaatataaaaaaagtggcctctaaagaggatatacacctatgtaatacaagcgacctataacgaaaaagattcgaccatcatatgtgacagtcgaatctttttatttttcatattcaaggtgattatgtcttttacaacgaaataaatagcaagcccctatataatcagtttcaaactctaatcctggaacgtatccagatttgatacgttctaccattgttttataacaattattctcttctgtatattccttaattaactctttcttatcattttctgtccagttttcttctacttcttcactctgaacatcttctatttctgctgttttcgcttcgatagattcccgtataacttcatttatacgggagaaattattcgttttatatagagcatacacaaatctaccaatccaattaggacttttccagcattctttatatcccttttcgaaccattcaattgcttctttatagcaattcaattcaacatataaatctgctacattaatttcccctaaaaaattatcagattccctgttaaaagtatctaacttctcttttgcttctgtcgttcgttctaaatcaattaaacattttacatagctatacatgatatagtccgaatcccctgcaactcgtaaaaaaaattccgaagctttttccagctctccaagattataatgagctacagctagattgtgatatgcttcatcggatggttgaatcgaaatagatttttgtaatacttctttcgcttctgtccatttttcttgtttcatgtaaatgtcccctaagatgttataaggaaagtatgaagaaggattcaacttaacaacttctcttattaattcaagagctttatcatcattctcttcctcatagaagtacatccaagcaagattattgagagattgtacgtctctagattcatgtactgcttgttgaaacagttccattgcttcctcatatttattttgttcaaacatttcaattgccttctcgttaatgttcaaataactacctccgaagtgaataaattcatctacgctttatcattattttaagatgtaaaaattgaaatttctataaaaaatttctttatcctgtctacatttcgattgaaatagaagctaaaacacacgaatttacaacaatgagtaaatttttcaatctcccttaaattggatatacatcctgttttattttacatattatggtacaatcaaaagggtactaactaaacatttacgctccacactagtaatctagcaataccaaaatcaaaattcacatggaattgagggatgttatgaaacagaaattagctgttcttctattcactggaatcatattatcaggatgttcaactatagcagagaattctttagaaagcgggaaaggcagtatggaattattaacaccaacgatcacagcaaaagataatgaattagaaattaaaactaaaggcattgatgaaaataaagtaacttttatttatgttgctaataaaaaagtattggaacaaaaactaaaaaatggtgaatcctacaagcttaatattaaagatatcgaacacgctcataggacagactacaaaccaaaagttcaacttttccaaacgaaagatgataatgatgatggagaaatggtaaccttcaaacaagttagatatacagttaaaaactgattttaaagttgtttcattataaatgtaacgaacgaaaatatacttttaacagtagataaatgtagggggtgctaacatgaaaaaacgatggatttcttggtggattggtaacatattttggattatcgtttttggaatatgggccgctattatttggctacgagatgttgatggtgctggtgttattcaaacacctgaaattaaatcaatatcacttatcgttttattaattgcgtttatcataccggtattttttcaaattatatggctaatcattaatttgagaatgagtaaaaaaaataattatacgatttagtttttttgaattaacagatcaatatttttcataaaaaaagagaggaatctacatcaaaatagattcctccttttacatttggacttatactgcacttttactgcagcactactcctcttttttacgatgcatgttcatctttcttcttcattaacgctcttttcttcatcgccttcgttaaatatccacccttaaacgagcgaatttcatacgaagacataaacgctttcggtgcaatttcattaatgatttctaaaagctctttctctctagaacgctttgcgacgatatctaagcgataacgtatagaattaataccttcgccttcaaatactgtaacgccaaatccagagtgacgtaactcatctactaattcattacaacggtctagtaaactaacttgatacgtaatataaccaattgctaatttattctctatataaccgcctaataacagtcccgcactaaagccaatgacataggcaacgatgttcatccaatttgataaatcttgaaacacaatacctaaactgacaatgtaaatagctccttctaacaatccaacaccagcagcggatcttgtttgattctttacaagcaaaatcgtacggattgttaaaattggaacgtaaataatttgtagcacaaaaataagtagcgcttgtaacattggtatccacctctttcaaaaagtcttttgtcataataacatacataacctttagaaatcgatgggttttttaaaatttttttattatttttcatactattgaaaaacgtaaaaaagaagcgtattatatttgtcgttaatttgtttacttgtatcaaatcactaaaataaaaaaggaacccgattaggtccctttcatcatagctctatgtttttcgaagcatgttccctttgcttctcttcttctttcactaactgcatatttgcatacgctaaatttgcaatcattaaaaagtggccacctaaaatacctgtaccgaatgcccacatttccatctcatgctcaatttcatacatgatgatagcccctaaaatagcagctgcaaatcggtttaaaactcctaatccaggagccttttccttcattacgatactttttccgagtttctccactctgcgagctaataaccaaagacaataggcgcttactgctaatccaataccgaaccctgtcacttgttttccaaacggagtaatcgtccacataagtagtaaaccactaaagatcacatacaattgtaatcgatatacacgtaaggcttcttgaatcaaaatatccgctcctaagttctcattttttgtactttagaagaaaagcagcaacttacacagttgctgctttctcttcttcttgttcttgttccatcttacgaatttcaacacgtttaatttggtaagcgtctttttctaacactttaaattcataaccttccgcgtcaacatgttgtccttcttcgatttcatgattttgcatcataatccatccaccgattgtatccacatcatcttcttcgatgtgtaatccaaataaatctttcacttctgaaataagcacttttccatcaacaatgatatgttgctcgttcacatgttgaattggcggtgcctcatcttcatcatattcgtcacgaatttcgccgacgatttcctccaagatatcttcaagcgttacaattccggctgttcctccgtactcatcatataaaacagccatcggaattcgcttcttctgcatttgaagtaataaatcgtgaattggagtcgtttccatcacttcaataatcggacgcatatacgagcgaatagatgataaatctttttgatcctcggtcatatatcgaataaagaaatcttttacgttgaccataccgataatatcatctttatcttctccaaaaatcggataacgtgtgtatcgctcattttggattactttcatgtgttcttctactgaatcttccaggtagaaaccaacgatttctgttcgcggtaccataatctcttttgcaatacgattatcaaattcaaaaatgttatttacatacttgtattcagcttgattaatttcgccactttcatagctatctgaaaggataagacgtaattcttcttctgtatgagctacttcatgttctgaagctggctttaaaccgaataaaccagttatcacacgagctgaaccgttcaatacccaaataaatggatacattactttatagaacatcattaatggacctgccaataataacgttaccctttcagccttttgaattgccatcgttttcggagctaattcccctactacaacgtgtaaatacgtcataatcataaaagcaagaccaaatgttaatactgatgaaatagaaggatttaagttccatttctcaaataacgggtgtaataacttttcaattgtcggttcacctaaccaacctaatcccatagctgtaactgtaatacctaattgacaagcagataaatattcatctaaatttgttgttacctttttcgctgctaaagcaccgcgttttccttccgcaacaagctgatcgatacgacttgaacgtatctttacaatcgcaaactctgctgctacgaaaaatccagtaaatgcgattaaaatcgcaaccatgactaaattaaatatttccaatgaatccccttagttaaaaaactaaggtgtccacctcctgtatactataatgttttcttatttgtttgttagaaaacatagcccgatacaaaaattaaagaggtcggatttcacttattctataataatagagcaagtgtctgtattaaagctgtcgtttgacctgataaagatttcgatattttttcacgttgtgaatcagtcaattcatctaaaagcggctttaactcagtaagctccacttctaattgatgaatatggtctgtcacttcattcacttgtttcgaaacgtgttcattgataccgagcagcttcttcttctcctcgattttctctttaatctcacaaagcggcatatgcatttctttgcacttctcaataaattgtaatgtctcaaatgctgtttcgtcgtaatagcgataattagattgagatcgctccgcttttaagatacctagattcgtataataatcaatcgttcgtttcgacacgtgagccatgagagccaactgtccgattcgatacaccttcccaacgatcttccccccttgtttatattacatacatcatacaacacataaactgtacagtcaaacgtgacggtttattattcacaatttatacaaaattccaatctcctcctatgatgattcaatacgagtaatctacacttatacaataaaattactaaactactacctaatcactacattgtctgccacttttaacctttcttatttaaaagcatatcctactaataatgattgcttgtataggagggaattaatatgaaaaagacaatcatttctcatttttataatgaagaatacctacttccatggtggcttatgcatcacacgaaaatattcgatcacggcattttaattaatagagggtctacagatcgttccgtagagatttgtaaactattagcaccccactgggaggtacgaaattcaagatttcttgagtttgatccaactaatactgatattgaagtgatggaaattgaaagagaagtttcaggttggaaaatcgttttaaatactactgaattcttttgttgtaataatactgaagaatttttttcatctcttcatacactaggccaaaacatgtatgcgattagaatgattttaatgatagataatcataattataattattcaaagcctagatattctatccccttagtagaacagcgataccacggtgtcttcccttataacccaaatctcggatgtgcttggagatttattcacaatcatctagacggtgcatatttacctggtagacatcattcgcggcacggatatataatttatgactatccttcatttattttaaaattttattttagcccttggaatgaacaatcaaaggcaagaaaattacaaattacacctaccctttcaaaaaggggtgttcaaatgggacttcaaacacattacggtcaatctcctgaagtactggacatacgttttttagagcttagtaacctaacacaagacctccgtcataaccctgaatatcaagaattatttccaaaattcaaaccgtaatattttctgcatcgtcatcacctcaaacattttcattcacttaatcaaaaacaatctcatttgcataaaacatgaatactgtataaataataaatttttattttaggaggaaaaaatgaaagctgttattcttgctggtgggtacggtacaagaattggggaagaaacacatttaaaaccgaaacctatgattgaaattggaacaaaacccattctatggcacattatgagtttgtatagtcattacggaattactgagtttattatttgcttaggctataaaggatatgcaattaaagagttctttctaaattacaacttacacatgtctgatttcacaatacagttaaacgataatacaattactagccattctcatcgtgtagaaccatggaaagttacactaatcgatactggtgtaaataccgaaacgggtggccgagtgaaaaagattcaaaattatgtcggagacgaacctttctgcctcacttatggtgatggattaagtaatgtaaatataaaagaacttattacattccataaaaaacatggaaaaatggctactgttactgccgtacaacctcctggtagattcggttctctcatattagataaacagtctgtaacatcttttcaagaaaaaccattaggtgatggcggatgggttaatggtggatttttcgttttaaatcctgaagttttcaattacattagtggagataagtctgtttttgaaacagactctttagttcagttagtaaataaaaatgaattggccgcatatcaacattctggtttttggcatccgatggatacattgcgcgataaaaataaattagtcgagctatgggaaagtaataacgctccgtggaaggtttggtaatatggcttcatcatctttttggaataagaaaaaagtatttattacgggacatactggatttaaaggctcctggctcacccttttcttaagttctttaggtgcagaagtagtaggcttttcttctcatcccccatccattcctaacatttttgaacaaggtaacgtagcaaaagagtgcacgacaatgaaaggcaatattacagattaccattctttatttcatgccatgaagcagcataaacctgacataatatttcatttagcagctcagccaatcgtaaccgcttcatacaaaaaccctatcgatacattcaaaacgaatgttttaggtactgttcacgtgctagaagcagcaaagtccgtcgaaagcgtacgtgccattattaatgtgacaagcgataaatgttatgagaatgacggtagtggcgaccgatcgttcgtggaaaatgaccgactaggaggtttcgacccttatagcgctagtaaagcttgcgctgaaatattggcaacatcctatcaaaaatcattcttccgcactaatacccagaaactcgcctcagtcagagctggtaacgtcatcggcggtggtgattgggcagaagatcgattattccctgatatcattcgggcatatttgcacaatcatactttgtgtattcgaaacaaatatgccgtccgtccgtggcaacatgttttagatcctctacatggctatatccttttagctgagaaactttggaatgatgctaaatatgcagaagcgtggaatttcggcccaatgaatgaacctaacagaaccgttcatgatgtcattgaatctgtaataaaattatggaataacccactaacaatcatttcctcctctacaaatactccttatgaatcacctgttttaacactcgatagtacaaaagcagtaaacaaactcagctggactcctaagttatcaacagatgattctatcgcttggactgttgattggtacaaaaaatatgcatctggtgaaaatatagaatctttcacatgacaacaaatcgatgcattcaaaaatttataaaggggctataaaatggaacagaaaaaatgccgtttttgccactcattactaaccaacacttttttagatttgggcgtttcccctctcgctaattcatttgtagctcctgaaagctcatataaaatggaacctttttatccgctgcacacatttgtttgtcactcttgtttactcgtacagctagatgaatttgaatccccgcaaaatatttttcataactatttatacttcagctcttactcctcaagttggctactacacgctaaacaatatgtagaaatggcgattaagcgtttcaacttaacgaaacattcaaaagtgattgaaatcgcaagtaacgatgggtacttattacaatactttaaaaaagaaaatatcgagacattgggaattgaacccgcgaaaaacgtagcagaaattgctatcaaaaaaggaattcctactcatgtgaattttttcagtaatgacttagcaaaaaaattgccacaagctgatttaatcgtcgcaaataacgtattagcacatgttccaaacttgcatgattttgttgctggtttaaaaacactattaaaacgtgatggcacgataacaatcgaattcccgcacttattaaaccttatatcctttaaccaatttgataccatctaccatgaacacttctcctacttctcacttataagccttcaaaaaattttagctcatcatcatttacaaattgttgatgtagaagagctttcaacacatggtggttcattacgtatttttgtaaaccatctaagttcccaatccactatccattccaacgttacaaacttactccaaaaagaagtcaatcacggactcgatacattagattgctatctccttttttctaaacgagtggaacaattgaaaataaatattttaaagttttttatcaaagcaaaagctttaaacaaacaaatcatcggctacggcgctccggctaaaggaaacaccctgttgaattattgcggaataggtaaagaatttttagcgtatacagtagataaaaatcctcacaaacaaaatctccttttaccaggaactcgtattccaataaaatctccagcagaaattaaacgtacaaaaccggattacattctcatacttccttggaatttgaaagacgaaattataaaagaatgctctttcattcgtgaatggggcggtaaatttttagtgacagttccagaagttgaggtgattgagccatgaagaaagttgttgtaacaggtggtagtggctggataggtaaatatgttgtacattcacttatacaaaagggatacgaagtgcacgccacgtataataaaaataaaccctctcacctcccttgccactggcataaagtaaacttgctccgcaatgacgaagtaaaacaattcatttacgacgttcagcctagccatctcattcaccttgcttgggaagcagtaccaccagcatgctatgtatctattaataattactattggctaaagtctagtatttcattgattcaacactttacaacatgcggcggaaagcgtgttgtcgttgcaggtactggcgcagaatacgaatggtttaacggcgtattatttgaagattcaccgctcctttcctataaaaccccgtattctttatgtaaaaatgcactgcactcctggctagaaacgtatgcacaacaaacaggcctcagcatgtgttggggccgcatttttcatatgtatggacctcacgaacaaggtaatcggctcgtttctaacattatcacttccttattaaaaaacgaggaagcactatgtacacatggaaaacaatcgagagatttcctccatgtgagtgacgtcgctgacgctctcgtaacaatattagaacacggcgttacaggcaccatcaatatcgcttctggtcaatctgtacaaattaaagagttagcttctatcattgctaaaaagataggaaaagaacatttaattaaactaggtgcaatccctttctctaaagatgaacctttatttgtcggggttaatgtaaaacgtttaaaaactgaagtaaactggaaaccaacatacgatctaaatacaggaatagaagaaacaattttatggtggaaatcatttatacaaaaacataacgatatgcatcattaaaacgtaaatccttcgttcctctcgctaattccttataccattcttctaatctttccggcgtaacaatatgatgcgtacccattcctccatgcttactagcttcagaaagagtcggaccaatttgtaactttctctttctcatcgcatcattccacggactaaacccaaaccataatatacaggcaagaggtggataaatcatcgattcatgcgcagataaatgtcttccaaccgtataacttccatgctcatgattatgaataaatcttccccttctccatagtctccactcctctggtaaataaccatgaaatcgctgtttcattaaaggtattccaaagttaagttccggataattatagttaggatcatcgaccataataagcccttctagccaatacatcctacctcccaattcatctagtgatttccaaaactgatttttatcttgcatgcaaagaaactcagtcgtatttaaaatcattttccatccttgtacttcttgttctatcctcatcacttcatgatctgtcgcatatgcatcaaactctggatttacagaatctcgcacttcccaatgcggtgcgaattttttacaaatctcaacggaacgatctgttgaacctttattaattaaaataccatgatcaaaaagtttcgtatgatgcataagccaccatggcaataaatattcttcattgtaaaaatgcgaaataacggttgtagttataataatctcctcctctttctctattaatctactttttatcctacaaccaatatactcataagcaaaaatatgtttcctaattattgatcaaatattattattaatatttttgtaagttttcctttggtacccagcccttctcaccatctcttccttcgccccaaacccatccattgaattcttctaatccaatcactctttctccaatactcacatttaattctttcgcagtatattgttttataataattcctgttccattcatatctttttttataatttgctccggaacccatcctttccggtcatatttctcttcgtgacaaaacatccagttttcccagttttccggaccagcgtaactctctatcattttcactacatccccctcttctaagcgaattggattaggataattgctaacatgtgattttataacgatatatttcataacaacctccaataatcagaaaattaagttataatatcattataacttaaagaggaggaatgcacgcatgtactacaacacttcattcgaaaacgatcaacctgtaggccgtctataaactaagacgggcaatcatataacacatacactacgcctcgtcttagggaactcataataccctaaaaatagacggaggtactttacatgaaacaaacaattttaggagctatatgtttatcactagcagcaagtatatggggtggtatgtatgttgttagcaaatacgtactcgattttatcccaccactaaccctcgtttggctacgctttatcattgcttttgttgttttgtatggcattttgaaactagctgagaaaaagcaaaagaaaaaagtaaccattcgcaaaaaagattggctcctattcgcttggattggatttatcggctatttcatttcgatcacatgccaatttatcggaacaaaattatccgacgctcatacaggctcgttagttacatcagctacacctgcatttatggttatatttgcagcgctcattttgaaagaaaaactaaccgctcgtagacttttatctactataatagcgacaatcggcgtcattatcgtaatcgggtgggatattgaaattggctcctattttattggaacaatcattttagttggagccgctattacgtgggctttactatctatttatgtaaagatcgcttcaatccaattctcatccttagttattacaacgtatgccatattcttttcactcttttttattacaccctttatgatatgggaactacaaacatcctctatcggaacagtaaatacgtacgtaatattaggcgtattatacttaggtattgtctcaacagcaggtgcctttttcctttggaataaaggattagaattaatagatgcaagcatcggttccttatttttcttcttccaacctattgttggatcattacttggctggctcttattaaatgagacattaaatagtaacttttttattggcggtattcttattatatgtagcgttttaattactacttttgaaaagaaataaaaagcaggcagagattcttagtctctgcctgttcgcattattggatcttgatcgtgaaaaccaatacaaatcggtatattactttgcacttcactacgtacacttataaaactacacagcgttttagcaattaaatataaagttacaccgactgctttttcacttgtgtcaaagccatttccattatacatatctgctaattctacagaccccggcccctcaatattatatgtccattcagatgcccaatcatcgtcctcttcttcaagtggaatatattcctcacaaatataaaactgactatcccattcgttatcaaggtcatactcaaaataaatcgcttttgattcttcattagtagccatttctacagctgcatccaaacctactcgaatacttttcttatatgactctaaatcaattgctttaattcgttctgcatattctgcagacgctaacatgctacaaatttcaaaatacttcgcttctatttgctctactgctaacgaaaagacatcctcttgcatctcttctaaatactgaaatatatccacactaaacactcctcactctttacgcactccaatgcgatggacgggataacattttcggtaatttcgtatgcttatcccctttcgctgcgttaatttgaacttgcgtcagaaaaatactatttgtaaaatcagccccgcgaatatctgcatctcttaaatctgctccgataagatctgctcctcttaaatttgctccatttaagttagccgcaattaagtaagcaccccttaaatttgcaccttgtaaatttttctttttcaaatttgctcccataagatctgctccgcggtgaatgattcgtttcttacgtgcagtattcatttccttccatactaattcgctcgtttctaaaagaagaatgttcacctctgccctatgcattggaacatttattttcattaactcatctggatttaaattcgaaagtcgctctgtctcctcaattgcggtctccagctctttatgaattggctgtgttgcctttaaaagaatcgcttcatttaaataccaaagcatttcatgaagttgatgtataaccggaaaagcatcgtacatttttcttgcatgctttgcatctttccgccaatcaatccctttaaacgtaccctgagaaatcttctgcccagcaccgaaacactcaaatactgtacaacctttataaccttttcctctaagatttttatgtatactacatttaaaatctgattgtaagttagaacatggtttaccaccatctttattcactgcaaaatctaccgatgctgcgaacggtaatgcaacgcaacatagaccgaagcatttttcgcagtttgcttttaaatgatcattatgattagtcaaaatctataccccctgttgtcttttgactatttcataatattccaactgtaataaataatcaattttaaaataaaccggcatctttcgttccaattcataactttatcattcgatttcctttcaattgaaaaggactatttctatttaatgaattataattaaattataaattttctaactaaaaggagacttattatggcactagaaatgaaaacaaactgtcaaatttgcaatcaatcgctcgaacaagattctgaagcatacatttgtgtatatgaatgtacattttgcgcaccatgtacagaagaaagacaaaacgtttgtccaaactgcggcggcgaattagtacgtaggccgaaaaagaaacaataaaaagcaaagcgatatcgctttgctttttattgttttctgagtatatgaaattatatcgaacacaacttaaacatttaaaaacttcacacaaacaggctctggcacagcaacatcagattgtaaaagtgttaactttcctgtagattcatctcttgaaaatagcacaagattatgtgacttttcatttgtagcaacaagaaacttttcagtaggatctaatacaaagtctcttggccaatttccttctgtagatgtatgttccacaaatgcaagctcacctgagttttgatctacgctataaacagcgatactattatgaccacgattacctgcatatacaaagcggccgtcagaagaaatatggatagcactgccttgactattttcatcaaattgttctggaagagtagaaatatactgtaattctgtaaaggatccttcttccgagttatatgttagcgcaataacctctgaactaagctccgtcattacataagcgtattttccatttggatgaaaagcaatgtgtcttggtccacttcccggattcacagacaggctattcacttctattaatgtactatcttttacttcatacgtaattattttatctatccctaaatcaacgcccactacatatttttcatcaggagtgtaccccgcgtaatgtgcatgtggtttttcttgtctttctttattcggacctgaaccttcatgtgccataatagatgaagcaggatttacagttccattttcttcatttatttcaaaagactcaatcgttcctttatggtaatttgctgtaactactgtatgatttccactatcaacactaatatgacaaggagaagccccttctactacttgtctatttttcgcttttagttctccagtatgactatcaatggaataagcagctacaccgccagattcgccttccttaacaacagaatagagatattcattatttcggttaatcgttacatatgtagggttatccagcttagcagtaagtgttacattaccaattttttttgcttccgtgtctaaaataaacttatatattccttcgctattttctttcgtgtaagtcccaacatatccgataaactctttgttatccttcattttcataaccctctctccctatatttttcgttcatcatactttttaaaatattttatgttgaaagagtatcctaaaaaatcggagtacctctttatacgttaccatattttcttggtaaatagcttttaaacccactttttttgatacgctgctatactttcatattcttcttccaattgacgggacaagcggatatagattggcgttaaatctttatatttttccacactttccatgtttggctcatgatgaaaatctgcacctaccatttcagaaactacggataatgtatctatttcacctaaactatataaaccgaggattgcagctcctaagcaagagctttcgaaactttccggaacatatacgtcttgatggaaaatatccgccatcatctgtctccaaagttccgaccttgcaaaaccgcctgtcgcttgaatttttttcggttcgccaattagttcttttaaagcgagaagaactgtatataagttataaattactccttctaaaacagcacgtatcagatgttctttcttatgatgcaatccgagtccaaagaaagatcctcgcgcatttgcattccataaaggagccctttcccccgctaaatacgggtgaaataataaaccgtcagatcccggattcacttttgctgctatttcagtaagcacctcatatggatcttttcctaagcgctttgcaagttcaatctctgaagtgcccaattggtcacgagcccatctgaaaatcataccgccgttattaactggtccaccgattacccaatggtcttcagttaacgcataacaaaaaattctaccttttggatctgttacaggacgatttgttacagcacgtatcgcaccgcttgtaccaattgtaacagccacaacgccaggatctattgcatttacacctaaattagatagtactccatcactcgctcctactacaaaaggcgtagaaacaagtacattcatctctttggcaaactcttcatctaatcctgttaaactgtgcgttgttggaacaagctttgaaagcttttcatctgtaattcctgctacatgtaaagcctcttcatcccactttaaagattttaaattgaacattcctgtcgctgatgctatagaataatcaattacatattctttatataacttgtaaaaaacatattctttaatagaaatgaatttataactttttgcgaataactctgcttgctcattctgtagccaaactaatttcgaaagtggtgacatcggatgaattggtgtcccagtacgaagataaatttcatgaccattcatatcattctttattttctccgcccagcttgcacttctattatctgcccaagtgatacatctcgttaacggctttcccttttcatctacagcaatgatactatgcattgccgaactaaaagagacacaaagaatatcattcggctgtacactacttattcgtacagtttctttaatcgtatttattactgcatgaaagatttcttctgggtcttgttctgctgtttcaggtgtaggagaatataaaggatattcaattccatgactagcaataacagatccatcagtagaaaatagaactgattttgtactagttgtcccaatatctacaccaatcatatattttgagctcaccatctcttcctcctaacaaaaatccctacagtgtcctaatcatataagaaccataaaaatatatttattttatctattcataacgttatgtgctaaagttgtctctctcaattcatataaaaatatccttattttaaccaaacatatcgagtagtaaaacgcctccaaaagcgataaatgaaagtaacgtttctaatactgtccatgttttaaatgtttctttcactgttaagcctaggtattcttttaccatccagaacccagcatcgtttacgtgagaaaacattaacgctcctgcacctgttgcaataacgagtaactctaagttcacacctatcgtattttcaacgattggcgaaacgatacccgctgctgttgttaaagcgactgtcgctgaccctgtcgcaattcgaattaatcctgctactataaatgctaatacaattggagatagagctaaatgctcagacatttgagcaatagcattccctacaccactatcgataagaatttgcttaaatccgccaccagcaccaataatcgcaacaattgaaccgattggtaataagctatcttctgttaccttcttaatagcctttttatcgataccttgacgaaatccaagaaaataaaacgctgcaaaacatgcaatcaataacgcaatgataggactaccgattaatgtgacaatcttcatcaaagtagtagacagtggaacatacggagccgctgcagctaaaaccattaacataactggtaacaatataactaaaaatgaaactcctattcctggtaatttcgttgattttgtatttacacgaatcaattctggctcattttcaggaattacacgtttgtgaatccatttagcgaatataggacctgcaataatcgctgcaaaaaatgtaataatgagtgaatacaatagtaccttcccaaggttcgctttataaataccaattgcaactatggcccctggatgcggaggaacaaggccgtgtacgacagatagcccagcaattgctggtaatgctatcaataaaatattttgtttcgttgttttatgaattgaaattactaacggcagtaatattaaaatgcctacttcaaaaaacaccgggattccaataataaaacctgcaattaacatcgcccatggtaagttttttatcccaaaggatttaataaagaactctgccacttgcattccagcacctgactctgccatcattttccctaaaattgtacctaatactaaaatacctactaaatgcccgagaacactgccgactcccgtttcataagcactcactattttatccattggcatcccagacataattgctaaaaacaaacttgcaatcgttaaactaataaatgcatgccatctccaccacgatacccctaaaataacaattacgattgataataatgtaatcattaaaaggtacatattcatacgcagttccacccctttatgtaaaccctttcaaaattgctatacaattaagagaacctatatagttctttcatgagtaagaatttatatatcgatatacaaatcatcttcacaaaataataatttatacaaaaagaatctcccttatcagagatacatgttaactcacctctctgataaggggatttctcttccataattataatgttattgtgataaacgcttcgcgcgatcaattttcccttttttaaaagtgaatgacactttcttctcttgctgttttcacgtagtaagactacaaactcagtatccactttaaacgatgaagttacttaggatttgtcttctcatgaaaaacaactttcggaaagcaccttcactttcataacattataatttaggcgctttcgcccaatcagcagcaaatttctcaataccttggtctgttaatgggtgcatagcaagttgttcaattactttataagggattgttgcaatgtgagcacctgccatcgctacacgagttacatgatctggatgtctaacagaagccgcaataatttgtgtatctagttgatgaacatcgaataattcagcaattttagcaactaatagtacaccatcttcagaaatatcatctaagcgacctaaaaatggagaaacgtacgttgcacctgctcgagcagctaaaagtgcttggttcaccgtgaaaataagtgtaacattcgttttcacacctttttcagtaaggtagcgacaagcttctaatcctgctaacgtcatcggaagtttaattgtaactttttcatcgccaccgttaattttaatcagttcttctgcttgggcgatcatctcttcagctgtaacagcatctggcgttacttctgccgaaacagattcaactttaggaactgcctgacaaatttctgcaatacggtcttcaaatttaatgccctcttttgctactaaagaaggattcgttgtaacaccagctaaaactccaagtttatatgctttttttatatcctcaagatttgcagtatcaataaaaaatttcatgattaattccctccagtttttaaacgttgatgagttacatgtttaatatgcttatcccgtaaaagcccgatttgtgtggaatgaagcccctacttattaaagtttcactttatttcttttctactgcatgtccgccaaattcattgcgcagagctgctacaacttttcctgtaaatgtatcattgtctaatgagcggtagcgcattaatagagacattgcgataacaggagttgctgtttgaaggtctaatgctgtttctactgtccattttccttcaccagaagaatgcataacacccttaatctcatccagttttgcatctttagaaaatgcattttctgttaattccattaaccaagaacgaatgactgaaccgttgttccatactcttgatactttttcataatcgtagtcaaattcacttttttctagaatctcaaatccttcaccaatagcagccatcataccgtattcaattccgttatgaaccatttttaagaagtgaccactaccagcttttccagcatataagaatccattttctacagcagtatcgcggaagataggttcaacgatgtcccaagcttcttgatctcctccgatcatgtaacaagcaccattacgagcgccttccattccaccagaagttcctgcatccataaagtgaatgccatctttctttaattgctcatatcggcggatagactctttataatgtgaattaccagcttcaattaaaatatctccttttgataaaagtggtgtaacctcatcaataacagaatcaacaacagcgtgtggtaccattacccaaagaattcttggtgattgtaatgactgaacaagttcacttaaactagatgtacctgttgccccgtactctttcatttcttctactgcgctcgtatttaaatcaaacgctactacttcatgtttatgatccattaaatttttccctaaatttaatcccattttacctaacccaattaatcctacttgcataatataattcctcctcaaatcatcttttattaaaaatccatatcactacaatctggaatacctttcagcactgaaatgttagtatgtacagaaaggtattcacagtcatagcttaagaattcaacacattttttgtaatttgaacaacattttctgtcgtaaatccaaatagattcatgacttcagctccagtacctgaagctccaaatgtttcaattgatattacttttccttcttgtcctacataacgttcccaaccgagagatacacccatctcaagagatactcgtttcgttatagaagacggaagaacggattctttatattcgttcgattggcgatcgaataactcccagctcggcattgcaacgatgcgaacagaaacttgatcttcttctaattttgctttcgcactagcagctaaggatacttcagaacctgtcgcaattaaaattacatccggattttcatttgtttgtgttaatacgtaagctcctttagagaaattctctatgttcgctttcgtttcattaaacaccggtaaattttgacgactcagtactaaaacgactggaccatccgtttgctgtaaagcatacgcccaagcacttgctgtttcatttgcatctgacgggcggataactgttaaaccaggaattgctcgaagagctgccaattgttcaattggttcatgcgttggaccatcttctcctacagcaatcgaatcatgtgtaaatacgtaagtaacaggtaacttttgcagtgcagccagtcgaatggacggacgaagataatcattaaatacaaagaatgtacttacgaaaggttttactcctccatgaagcgccaatccattcgctgcagcgcccattgcatgttcacgtacaccgaaatatatatttcgtccagcatatgattctactgcatatactgcttcaccttttatatctgtcatcgtagaatgagaaagatccgcacttccaccgaaaatagaaggaatcgatttcacataatgattaatagcttccccacttgcaacacgagtggaaatcgttttttcagtatcaaaagatagaatgtcttttgcttcaattaaaacctcacctgtaatcgctttttctaattcatctgccagtgtaggattcgcttctctgtataagttgaactgctcattccagtcattgtctttttcaatacctttttgttttagttcattaaaatgagcttttacttcttcaggtacaaagaaatcttcctcataatcccaaccatacacttgttttgtcgctgtcgcttcttctactccaagcggattaccatgtgctttgttcgttccagcaacttttggacttccataacctataatggttctaatttctataagagtaggttgatccgtattttctttcgctgattgaatagcttttgtaatcgcatcaacatcgtttccatcttcaactcttacatattgccaatgtacagattctgcccttttctgaatatcttcagagaaagcaatgcctaattcaccatcaagtgaaatttcatttgaatcatacagtacaattaacttgccaagtttcatatgtcctgccattgacatcgcttcataagcgacaccctccattaagtcaccatctccgactaaagcatacgtattgtgatctataatagagtgaccatccttattgaacttcgctgctaaatgagcttctgccattgccattcctacagcattagcaatcccttgtcctaacgggcctgtagtcgcttcaactccaggagtatgcccaaactcaggatgtccaggtgttttactatttaactttctgaaatttttcaagtcatcaattgaaacgtcatatccagctaaatgaagtaggctatataacagactagatccatgtcccgccgataaaacgaaacgatcacggttaaaccattctgggtgattaggattgtaatttaaatgattcgcccataatgcataagccattggtgctgctcccatcggaagacctggatgacctgagtttgccgcattaatagcatcaatcgataacgtacgaagtgtattcactgctaattgatttatgttttgtgtcatagtaatcgtccccctaaatgctttcattaaagaaagtacttatttttccgtctcttgatctaaccaccatttaaatccactttcttgtaacagttcattagacgcttctggaccatatgaaccagactcatattcatgaagcggtaataagttttcctcgaacgcttcaagaattggttgtacccattcccatgacaattcaacttctctccaatgtgcaaagaatgtagcgtctccactcacagcatcatgaatgagtctttcatacgcttcaggtactcccacatccgcttgctcacaagtaaagttaatacgcatcggttcaatttctccatttttcaatggatttttactgtttaactgtaatgaaacgttctcacctgggctaatttcaattattaataagttaggtgctgcatttggattattatcttgatattgctgttttaacgtatttttaaattcgattacaatacgagtagacttttctttcattcgtttgcctgttcgtatatagaagggaacgccagtccaaaatggattatcgatccacaggcgagcagcaacaaatgtgtctatgttagaagaaggatttactcctggctcctctttgtatgctacaacttgcccgccttttatctcacctgcagcgtattgtccgcgaatgatatggctttgaacgtcttcttttttcactttacgaagcgtttccattacctttcgcttttcctctcgaatttcacatgcattaaccttttccggcagattcatagcagtcatcattaatatttgtaacatatgattttgaaccatatctcgaatggcccctgcctggtcataatatcctgccctttcttcaaccccaactgtttcactcgctgtgatttgtacattcgctatatgttctttattccaaattgattggagaacaggatttgcaaattctaatgcttcaagattttgaatcatcggtttacctaaataatgatcgatacggtatatctcgtcttcttcaaacgtgcgactaagcttatcgttaagctcacgagcagatgtaaggtcgtgcccgaatggtttctcaatcatcagacgtttccatccatccgttttatcaagtccgctttccttaatatttaaagcaatggtctcgaaaaattcaggagcaacggaaagataaaacattctatttccttttatatgtaattcttcttccctttcacgaacgacttgtaataacctctcatagtcttccggcttactcacatctaatggacaatagcgaaaattatctaaaaaaccttccagttccggagtaccttcttctctatgacgggaaaacgtctctattgattcttttattctttcttgaaaatctacatgagatacttgacgtctcccaagcccgataacggatatttgctttggaagcttttgatctctatataaattatatagtgctgggtaaattttgcgtttcgctaagtcccctgtcgctccaaataaaacaaaggtcattgattccaagttcagtccccctcttgttgtataatcctcgtcgatatactaaaaatgaattgtacagaagcccctgtttttataaaaaaacaaagagttatcaaatcccaattctttttatacctttcgctttttaattgtccccaatattaatagtggcaattcaaagcatttctaccacaacttacttatttatagaatttaacgaaacattttatatctgattacttttagtaattaaataatcttatgtctaatatattaaccacataaattattatcgtcaataaaaatgtcttgaattacatacgatttatttcgtaatacttttctaagtgtattcctagttaccattcattttcaaagataatgatcgttataataaatatcatttttatcaaaatattcaattaatttagcgctaaactcacgagcagacgttacattataaccaaaaggcttctctataataagacgatttaatccttttgtagctcacaatccactttccttaatatttaaagcaatgacatcaaatacttctggtataacagataggtaaaacatgcggttttcaggaatgtttaattctgtttcacgcctctttacaagactcaacaaatcttgatagtcctctacattcgctgtatttaattgacaataacgaaatgtgctaataaacccttctactcctgattcgtcatcagtagatcttctagaaaatatagcaatggattgttctacctttgtttgaaattccacatctgacattacccttctgccaataccgataatcgaaatagactgcggtatattttaattactaaatagtttgtataaagcagggtaaattttgcgtttcgctaaatcccctgtcgctccgaataaagttaaactttaattagccctcaccaatctggcttttacgagcagcccaactcccacctaacttctttgctttcgctgaattttgaggcggggtcttactgcccggcaaatagcgggataaacataatgaataaatcatgctgcaaaaataacatctaccctttcttcaaaaagctttacagtagtttttagaagtacgttacattatttcatttcatgcactttccccttctctatataaaattctcactaacaaaattcaaaatattatacttatttttcgtactttgctatgctataaccacaaacaggaggtataaactatgaaagcacaaattatccattcttttggggattcatctgtatttcaattagaaaaagtttcaaaaccaaaacttttaccaggtcatgttctaatcgatgtaaaagcaacaagtgtaaatccaatcgatacaaaaatgcgtagtggggccgtttcagccgtcgctcctgagtttccagctatattacacggcgatgtagctggtattgttattgaagtaggagaaggtgtttcgaaattcaaatcaggggataaagtatacggatgtgccggaggttttaaagaaactggaggtgcacttgcagaatttatgcttgctgatgcacgattaattgctcacaaacctaacaatttaacaatggaagaagctgctgctctaccattagttgcaattacagcttgggaatctttatttgatcgtgcaaatattaaacctggtcaaaatgttctcattcatggagctactggtggcgtaggacacgtagccattcaactagctaaatgggcaggcgctaaagtttttacaacagcttctcagcaaaacaaaatggaaatagcccatcgtttaggagccgatatagctattaattataaagaagaatctgttcaagaatatgtacaaaaacatacgaacggaaacggatttgaagttatatttgatacagtaggcggcaagaatcttgatcattcttttgaagctgctgcggtcaatggaactgtcataactattgcagctcgttcaacccatgacctctctcctttacacgcaaaaggactctctctgcacgttacttttatggcattaaaaatattacatacagataagcgtaatgattgcggagaaatcttaacgaaaataacgcaaattgtagaagaaggaaaacttcgtccattgctagattctaaatcttttacgtttgatgaagttgcacaagcacatgaatatttggagtcaaataaagcaataggtaaaatagttttgaaaaacgtttggtaactttcactaaataatacaaataacaaatgtttgttgttggaaaataacagcgagatcgcttcgccttatctttttcttaagaggcgtgccacaaccttaaaagctttccatcctttacaacaagtaaaaaaataacagctgaattttgaagcggggtcttaccgcccggcaaatagcgggataacattcaaaaaccttgcagaaaaattctacaaggtttttgtctataaatacaaattaatcactatattaaaatgaaagagtttgtaattcatcacaataatattaaatatacgctgctttaaaggcttgttggacagcttgtacttctaatgagtctttaccatataagttcgttgctacacgaatacaagcttcttttaattctttaaaatcagaagtcatatttaattcatccgtatttgcataatagaaaatatcaaacattttatcttctccaatgccatgtacgtttactccattatggcttccaccactagcaatcaagtaagctactttattaataatgctagagttcgtgtgtacaccaccatgatcgtggtcagcatcaataggtaagttattataatgcctataatcctctggatatctagaagagatagatgatgggtttttcatatctctaaaaatacgacctgattgttctcccattgtccaattgaactttccgttattggcatacttttcaacggctactcctaaaatatcagataacgcttcattaattgcaccagcttctcctgcgtactcaagtccagactcatttcttgtaaccgcgtgtgtaaattcatgtcctgccacatcaaatgctctaacaattgggtctccgtatactagcatagcgccattactaaatgcattaaaccactgcttaggatttcctttattcgtaccatttgtgttccaaccatgaacgacagaaattactttttgtccgttattatcaaagctgttacggccatatttttcttgataaaaatcatatactttcgttgctaaataatgggcactaactgctttaggatctgtaaaatttgtagaattacttgttactaaatcatcgagataaccccatacatttcttctataattattataatctttataattagcagtatatgtttcaattcccttaccacgagaataatctgcaagcatgtacgttccatcacttctttgtgtaattccaaacgtacgattaatacctaagtcatcttttcctgtacctgttaattttgaaggatctgttgatttatttgatgtcgcagattggacaatactactctctacttgtatacccaatttttgaacgagttcttttaatagattaccaccaaaagcatcaattaatactgtaccggatacatattcaggtgtagatgcactaaaagtaatttgatatgcgtttgtagctttatttgtattttcatctacatataccacttgtttaatttctggttcttcgataaatgtgagatcatttccatagatgttgaaaagctgtttctttgcatcctcttctgatagagtaataggttgtttcaaatcttcctgttgttgtaaattttgggcactatctcccgaaacgctcgtaagtacaccatcatcattaatatgtgctgttagttgatatccgtatacatcacgtccttcatacgtttgttgaagacgtaccaatgtagtaccatcataagatttacgactttgcgtaacattataattaactttggattccgtattaacttgctttgatgataatgcttgttctgtttttccttttagtgcatcctttgctacattttctgccgaattttgagaaggtgctgttaaattacctgttcggaacgtatcttcctttgtttccacttttaaatcttctgtttccgcatgtactcctccataaggcataatcgccgataacaccactcctgtagttaaacctacctttacgaaattattcatatttttacccctttataatcgtattattaaattaaataaatgtattttagaattttaagcatagataaaaaattttaactatagccaatcgtttttacatacctctacatacataggttaatagattggtttgctacttttttagattcaattcatttctcaaaaattattcattatataagctatctttatatttattcatatacgttattttttgtggttctgataacatatttattgccatccacacattctttttcatttctaatttttgcattggtatctcttttaaaaactgattacctataatcgcttccatttcttcatcaattctttgtataagattttcttctggattattttgcaaagaagtatttttcaatccccattttgttattataaattcattcattttattcataggattaataatagtagctttactagttaatcgtttttttatttcatcatgatagattttaattctatatccctcttttagtggaatgatatcttttacaattgttacatttgttccttccatttccttcgtataaattttttcacctttttcattaaagacctctatcgatgcatatttttcacctgcataatagctatgaggcgttttagtagtaatcgtaaaaatagctcgattttgctctaagtctgtatttaatacggcaaactggtcatctcctaatcctaggaattgaatcgtttcatttaccaacttactcactttcatttcgttaatatcaatctttagactattatctttttcttttacataggcataatacgaactgaaatggtacatactattcgttttcccacctgaaatttcaaccgtatacactccatttggtacgtcttgtaaattgatatctgttgtttcaattgttttctcttgaataactgtattcccttcttttaatttaatttttcctccttttaatgtatctatttcatttgtatttaaatggatatgcaaattcccttttagcccaagtggagcaatttgctgattcgtaactatttcgaagttggagtttatcggaatatcaggatcaactatagctcttgctttcgctaattgtgattcaggcactatataagctaaagaagtaacagccggaaaacctttcgccctattcatctctatttgtttatgattaagcttaaagccccatctttcaaaaacaggtgtaaaatcaacttgtccattctcactataatactgattcattaaatctggtaaagaatggtcaccttttttgaaagcagcattgctagctagttttcgataaccttgatacatttttgcaaatgcttcatcgccagctttttgtttcgccatcgttaaaagaataagtttttgtcgtaaatctaaatcatcataatttttattttctttcattaaagcattatataaattccgttctacctgttcctttttcccgaaattaaacaaccaaccaacttgatctgcttttttgccgtatttactatattgatattgaacaccaaatagattattagaaacttctcctgtaaatattccttgattatcaaaaccagcttggtatccatgagcgatttcatgtaaagttccccaacttagtttatctaaccacatctttgtactatctgtactattcgctgtccaatttgtgccataataggcaccgccagcaccagatatatctgcttttaagaaataacgattttgactttttttattttcaaacgttgagccatctaaaccaataattgaatcatacatcacaaaaatatcttcataatacgcaattaactcatccaatgattgaaaatcttttaaagatcttactaactctttatcttttttaggtacaaataattgaaaactctccccttgaagtaacgcatactctccatcaaattgatcccatgtactaaaaaattgagatacacttccttgttgtttataaatgggaagggggttagtagcactttcattccctacttggtactcaagtacagcgtgctcttcaccatacggagtatctatgaaaggaactaaagacgtatcaccttggatagtaacccattcatttcctacttgtatggatttttcattttttgagtcattagacaataaacgtaatgttaatttgtctttaaaattaggatttgtttgtcttacctttaatggtgtatttctcttcaaaataaatcctaaatcttgtcggtcatgatatttccccttacttatgcccgcctgaaatatccaagtaggctcttctaaactagtaattttttttgcatttattcgttcatcagcatgtaagtgtatatttcctatgaggaaaaacattgtatacattaggcctataacaagtaaccttttcatttgcatatctccttctctatttttttatatacaaaatacaataaagccctccttcttcacttataattgtcgtcaataagttacttatcagtgtaattattatagttacattaactcgtgattatcaatcattaaatgtatgtaattttgcatatatgaatattttgtgataaattccaaaatatcgtataattatcaatattttttcagacattattcaataaaaaaaacacgaagactcttaagtcttcatgttttttatacatgttattacacttgtgattgaattaattactaaaatctttttaatcgtaaaaaatcaattatttttaggctgatagccgtacctaatcttttacaatttacttattctttttgttctgtaatattaaattttgaaaccaattccgttaattcttccaccttttctttcattttgttggattggattgatatttgttcaattgatacggcctgtgattgaattgaatttacagtttgaagagtctcctttttcacatccgttgcagtttcagaaactagcgaaagagaagcatttacttcttctgtaccagcagacatctcttctgtcgctgcggatacttcttgaatttgacctgtaatcttatcaatatctctcataatagacaagaaggtttgattcgctttgtaagcagcttcttttccttctactgccttttgttgtcctttttgcatgacattaactgtatcttgggtatctttttgaatggattttattaaatgattaacttcttttgcagattctttagattgctcagccaagtctcgaacttctgcggcaaccactgcaaatcctttcccattctctccagcacgtgccgcttcaatagcggcatttaaggcaagaagattcgtttgttcggcaatattagtaattgcagcgagagctgtatcaatctgttgtgtacgtgtaacaagtttatttattacttttgatgtttcctcgacaacatcatgcacactattcatttgaagaatagagtgatttatcacttcactaccgatatttattcgttctgtagtcgttactgctacctcagcgactactgctgaagattcagctacagtttgcaccccggttgtaatttcttccattgaggatgagctctcctgaatactagttacctgtccttctatttttgtttttacttctaaaacagtctgtacaacctcatttgaaatactagacgcttgatttgtatcttgtaatacactctccgtagtaaaaataacctcttgtgttgtcatcttaacattcgcaattaattgttgaaggttatctaacatactattaaaagactgaacaatatgccctaattcattatttgctttataaggagtacgtgttgttaaatctccagctgctactttttccatatcattttgtagtaatgcaagtggttttcggatagttaatttaataacatatccaattaatataattattaaaattgctaaaatcgaaatactaacaaacattatcattgtattttgagcactattattattttccttctgtaaaagctctgcattattactattatataaaatcaattcacgaattgattttattgatttttgcatattaggttcaatctcttttagataatatgcatatgcttcctcattattagacttccctaattcttgtgctttcttcatttgagtccttaattcattaaatgtttcatgaaacgtgttatataattctttttctttagtagaaataagtttagcctcaaactgctttaaaagatgatcattttccttacgaatcccatccatttctcttattaattcgttcattcttttttcatcttttgataacattatttccataaagttcatattaacgtgataaaaattagattctacaattccaatccactcaattggcagtaaattatcctcatacatattagaggaagtacttttccctctttctaacccccaaaaccctattagggataatactatacatgcaatacttgatatagttattaatatgtttagttttgtaccaatcttactgtttcttaataattccaattcactttctccattctaatatatagtttaagtaatgtattttataccaagaatccaaaaattacgatgtttattttgtaatatgtaattttgcatatcgtccactactgattcaaaataacctaacattgtaattttcgttttccaaaaattcatgatcatgaacacatctcattaattcttgaacttcttacccaaaatatccgcatatactgtggcaccagggaaaaccatcactggtatgatatataaattacgcttccatacaagactagcttaaaaatatttttcttattgctcatttttctattccccctctattagaagtactcctagcacatcacactaataaaaacgataatattaaaaaataaggaaagacataatacgtatgtctttcctctaaaattgtaatactcaatatgctcttggctctatttgattttccatttaaatcctcacatatctttctttataatatctcctaactccatccaatttgtaatacgcgggatattgagatattgattgtaagaagtagtttttgcatatacatttatcggttttcctattaacgtttctaaaacagccggcttatcatcaaagaaatagtttaattttatttcttgtataaagtgtattttttcttcatccttcattccatagaaaaagcgatcttcatgtaccggaaatcctttttctattaaccatttttttgtttgctctccatgctctttaggtcgcgccgttatatagtaaatttcatgtccctgtctttctaattcttgcaatgtctctacagcatacggaaacggtgaacaagaagtataataaatctcatccagcaaactattccacatatgaccgccttcctcggaagtcatgccaaatgcttcatgaatttcaattgtttttaaagaatggaatacatccaaccctacttttttgtttaatttcttattatataaatgaaaagcatgctgccttaaatcaattagtgtatcatcgatatcaaatccaaacttcactcttcatcgctcctttctgcaatccatttatcggaacatataagtagtttttattccccttattgctcatctttccgatatgctggatagccaataaatctataatcttttccaatctgggtaaatgatatatccttaaattcaattgcatctttcattttagtaataccagtcccctctacaaaactaggcgccaatctacctccaataattttaggtgcgaaatataaaataattttatccattagtttattttcaataaacgaagcatttacttctccaccaccttcaataagcagggaggaaactcctttttgtcctaaaacatcaagcatttcatgtaagtttatatgcttttctccgctagtaacaaatactttaactcctgcattttctaatgctttctttttttcctctgcatgattacttgttgtaaatatccaggtaggagcttctctatctgtaacaacgttagcttccatcggtatgcgtaatgtcgagtccaatattactcgaattggatttcggccatttggaatacgcgttgtcaatgatggattatccttttgaacagtattcgctcctactaaaatagccgcattttcgtttcgtatttggtgtacttcttgtcttgcttctgtagatgtaatccacttactatccgataaagacgtagcgattttcccatctaatgtaactcctgatttaatcgttacaaatgggcgctttgtcaaaatatatttattaaagacttcattcatttttttagattcttcttcacacactcctacaagtacttcaatacctgcatcttgtagaattttaattccacgtccagaaacaagcgggttgggatcaagtgtagcaactactaccttcttaattcctgcttgtacaattgcttcagcacaaggccctgttctaccatgatgagaacaaggttcaagagttacataaattgtaccaccacgtgcctgttctccagccatacgtatcgcatgtatttcggcatgtggttctccggccttcatatgtgctccgacccctacaattcgattatcatttacaattacagatccaaccaatggatttggagtcgtttgtcccttcatagccttggcattttctagtgctagcttcatatacaattcatgctcaagcatgtaagtgtcccccttcaaaatgtccagaacgctgaatcttcgtttgcaaatatttctcattaaactctgagacatcaccccataacggttcacgactcgtaacatttaatccagctttttgtaacgcttctaattttttcggattatttgtaataagttttacaggttttgagcgtagcgcttttaatacttcaattgtatcatcatagtttcgaacatcatcttcaaaacctaggttcagattagcttctactgtatctaacccattttcttgcaagaggtacgtcatagctttactaaacaagccaattcctcttccttcatgattcgctaagtaaaataaagcacctgaaccatgttctgtaatcatttgtaaagactgctttaattggaatccacagtcacaacgtttactaccaaagatatcaccggtgtgacaaatactatgcatacgaattagggcatcttcagaattctcaaaatcaccatatacaagtacactagattgctgcatatcagctaaattaatagatgagagtttttcgataattccttctacactatttgtaacctcactacattgtaaccaagaataccattgaaaaactttagtctccccatataaattaattggcaatttgataggacctactaaataaatatcctttccatcttgatgtataaattgaattttatcttctaacatatgaattgtatctgttgtaaccattaggtacctcctagtatagagaatctctaaaattctcttccattgttatattttttattgtttaacttacacaacgtaagtgtttttacagatgctattcttttttctctcagcttatatgcaatatgtatcattacaactttggccatttaaagaaaagagttttagttacataaaacaacttagttactttatgtaagtgagtatacattcgtaatcaatttacgtcaagtaattaattataaaaacatttgttactaatagtaagatgttatataatttattttaggaggtgaaggaaaatgaatgattctacattatgccctcgctttgaaaaaggaatgaaattttttagtcaacgatggacagcactaattatttaccaacttttttctggatctcagcgcttttgtacacttgaatcttctcttcctgttagcggaagattactttcagaaagattgaaagaattagaactagaaggaattgtcgaacgtaaagtctttcctgagacaccagttcgtatagaatattctttaactcaaaaaggatttgctttagaagctattattcgcggaatagaagaatggtcacaggaatggatagaacttgaggaataacataaaagctttttcgtatatagttttaagtaatcaaattacagatacctattattaaaacgctaatttttcaagcatttatgaaaagctagcgttttttaataaataaaatgtaagaaataaagcaaggtgatcaaaacgatcaccttgttcccttacagattaaaatagtgttttaaaatcttttattcatacatactcgattaataaaaaaaacgaataagcttttttattaataaacagttttatttttacaatacagttagcttcccctgctatttgcggacagtaagaccaccactgattaaatttctattttattacattcgaatattacttatgaaatttcacacgctcttcaagtggttggaattctttttcacctggtgcagctgttggattaccaaatggcatttgtgcaattagtttccaattagcagggactttccattcttgttttacctcatcgtcaattaatggattataatgttgtaatgatgcccctaatccctctgcttctaaacctgtccacacgactaattggtgcatacctgatgcttggtgtgaccaaattgggaagttttcagcatatgcagcaaacttttcttgaagcgatttaacgatagcctcatcttcaaagaataatactgttccataaccagctttaaaagaatccattttttgttgcgttcctgaaaagtctccatctccaactacttttcttaatgtttcagtggtaatatcccataatttatcatgagcttcaccaaataatacaactaatcgtgcagtttgagaattgaaagcggatggagtatatttcacagcaaactccacgatttctttaattttttcatccgatacttgtacctctttattaatcccatagtaagtacgtctttctttcagtgcagtatagaaatcttttgtcataattccgttcctcctaagttttaatattcttcaaaatgatacatctcgaagatagtatgcgtttaaatgagttcatttttgaatcattgaacttcctagcacccattgccagtcattctaaatctaaacacactgcttccttcagttttcctaaaaaaagccttataacatcattcataaaatctaatcatcattcggtactattttacccattctctattcatgtatcctgcttgtttcatatttacacaaatatgaaatgtagctactttaatcaccaaatttcacattaatttagagcatcttcaattacagcaatttcgctcactcgaacaaaacgatgcaatttaaagaacattgcaaaattaagtgctacctgtaaaagaaccctcttagccgactataagaaaaaataataaaaagccaaaaacgaacaataatatgttcattcttggcttttacttaaccatcacatttatttttactattgcttcaaatgatttttaactgcccttattaccaattcgtgatcttcttctggtggtaatcctgaaactgttatcattccaataacccctacgttttttattctgataggaaaacatccaccaaacgcagcgtattctgaagtatctaaaagatatttttcattataggagaccccagttatttcactttgtatctgcatataatacgagctacgatcatgcagggaaacgactcgttttttacgctcaatccatttcgtattttcctcatttgtccctgtcatcttgaaatgaaataattgcacaccatttttcgttatatcaacagcaatcaatttcccctcttgctttgctgtttcaacgataaataaacctagttgcaaggcatcttcatttgtaaaagaggaaaattgaagtgtttcctcctcttttaaaatttgtttacttatttcattcaaatttgaagtactcatatctttgtcccccttactcactttatgccagattgctacttttaaaattatgcaatcctatcgtgcggtctttccatataactaataccgtaaagcgtattcatttcttcttggtgctattatgaattatatttaactcattaaaaatgtatgtcctctagtgctaaacatttcgtatagaagttttcttccgaatactacttacaaacataaaaaacagttgattgagcaaccggttcgctaaaagtttcatatgggatattcatttaaccaaaggaatgcttgttcataatcatcaaaaaattacactcaataaagcaaccttatgtacgaaaagagactatggaaaagatgaccttttgtcactcatttaaaaagggacaaactctccaaatggagaagcctgtcccaaaatcgctttattttattttgcactagaactaacaatcgtgaattagaataatgacttaatacttgctaagacagtaagtacacctacaataataacaaatacgttactcattttccctttgtatttagctagtactggaactttttgaatcgcatacatcggtaatagacataagatagcagcaactaatggaccgcttagagaatcaataagtccaagaatacttggatttgtataagcaacaaaccagcatgataatacaacaaaagtaaggattactgtcttaattgttttttcttcaatatcttttccacgtgatttaccgaacttaataatcatgtcacgcattacttcaaatgctccgatataatggccaaggaaagactttgtaatagccacaaaagcaataattggagctgcaatagtgattacaggcgaattaagctcattagcaagatatgaaagaattgataagttttgttcttttgccatttttatatcatctggagtcaagctcaatgcgctactccaaacgaagaacataacaacagcgaatgtcatgatataacaaaccttttgtatttgcgcacatttagcatcagtggcttcgattccatacgtagctctctgtttcacaacaaatgatgaaatcataggtgaatgattaaatgagaatacgatgattggtagaatcatcaatatcgttccaaaatagcctgttcctgttgaagcagttgaaacagctgaaaaactaagcattgacgtattccactgtggaattaaagatattgcgataaaaagtaaagaaactatgaaaggatacactaacatactcattacctttacagtaatatcttgaccaaaattcagtatagcgataagaccaagaactaatacaagtgataaaatagctcttggaggttctggcatgtgcaattgatgcacgataaaactacttgcagtgtttgtaagcgcaaccgaatacattagtacgattgtataaattgaaccgaaatatacgatgttaaaaatgatactcgctttatttccgaaatactctctaattgtacctgtgatcccctcatcagcagaattagaagcgtatatcattttagcaagcgccctatgtgagtaatacataactggatatgcaagtaatgtaattagtagtaaagataataaaccacctgaacctgcattaatcggtaaaaagagcacccctgctccaattgcagttccaaatagactgagtgcccatgtagtatcctgcttatgccactttttcggatctgcatattgctcattttttcgtgcggtattttcagcttgaacttctattttctttgcagtattcccgttcatataataactcccccttgtatctattcctgcatctctctttacacctaacaaatattcccttttcggaaaatgaattccttacaagttgccccactttgtatgtccttcatcataatgaatccaaattgaaacattcgctagttagcgtcctaatataattgttagcgttcacaaaaaagtttactcgtaatatccgctctttatataaagacctcttaagagaacaatatagaatagacttcataaatacgttgcaacatttctaataacagtgtattactttaatggtttctcttttttacttttaacagtaattttagataaaccggcctctcttcatttgcgaggcatttctttctcaattctatacattaccttcataacttcggtagcactgatgatactgcttacacaagccactgaagcacattacatacatttcgcctctaatcacacacctttcttactagtaatcgcattttttatattttctccagagataataaaatttctctcgacgccctcattataacgtgtatatttataaaattaatatttttatattttcagaaatattaaagtgcaataattttatatggataatattttacagttagcatgtagccattgtttttatcgcttaaagctgaattagttagtaaaaaaatacaataatacattgttgttctaggttactcattataaagatacttatatcccctttatcaaaaaatttcattttaaacataaaagatattctaataaataattaatgtaggtaaaaagaaaaaattccaaaataaaaaaaaaccaaattttaggatatatattattaatattgaattcatatacattttaaaaagatacactgagtaaaaaacaaaaaagctgccccatatggacagctcatttacataattatcgttatcaggaatatctctatgtttgtaatgaatcgtttttacatcatttccttttatgcgaaaagtaattgtgtcctctccataaggcggattgtgtgcaccctcaaaagtttaaattttaaaatccctcattaactagctcttttatcgagtttaattttgaagaaagctcgataaaccattcttcatcccctgttaataatgcaagatctataagataaaggatttgttccttatttattacctttgattcagggagtttgttaacgtgtttactaaagagtaaaatcgcttcgtttattgtgtactggccgtcacgtttcacaatactaactgtaactatatcctctacatcatcaagtgatacaatataaccaactattaattcaccttcatttgatattccacgaacccaatctcctacttttaaaacatgattattatttgacatcataccgtttcaccttcctataaatattttttgtgacaataaaaaagatataaaaacaattatactgtaatatttttcattacatttaagtgttaagaactcacggctatataataattaagccgcttaacgctcttgattgataaggtcaacaacttctttcattgtataattctttaagtattcacctagatgctcttcagcacctaagaaaatagcgaaaagaacttttcgcatgttcgaacctacaacacactgattgtttgattctggacacttcggctgcaaagcaccttcagaggttatctgataaatatgccaaagattaatttcatctaaatcgcgagcgaaaataaaaccgccaccagtcccctctttcgattgtataaacttatgtttttttaacaaacttagtactttgcgaatgcgtactggatgtacacctgcactttctgaaatagcattacttgttgacatccgatctggctgtaaagctaaataagttaaactgtgtatggccaaggtaaagtcgctgttcatgattttcctcctacgatcaaaaatattgtttctcatatattaactgtagccataaatattacagataggttagaacgttaaaacatatagaatacttcttgccataaaaaattaattctcttatattctatccggtcccacctatatctgataacttcatttagctttttaagttgaaaataaaattaaacactccactgtttcttcacttgttcttctgccaactgtttaatttttgtccaaatcgtatctttactcacaataacatttgtttgataatttctatcattataattaactgtaacacatacttcaatcatcttctgcttcctcctttcaaaaaactttttctaaaaatactacttattaattggccaatttttgcaattcaatgttcaaaaacgttcgaacgctacgtggtaaaaatttacgaatttcttcctcattaaaaccaatctgcaatcttttctcgtccagcataattgggcgtcgtaacattagtggatgctcaattattaatgtataaaattcatttagcgagagctcatcaatatttatatttaagtcctgaaaagttttggatctagttgaaataatttcagtagccccctcttcagttaaacgaagaatcgatttaagctcatcaactgtcatagaatttgatacgatgtttttttcaatataatcaatttgatgctcttcaagccatgctttcgcttttcggcatgaggcacagcttgctgttgtatatagaattaccatatttaactcactcctttaatgttatgaaacgtacattttaaacatcggttattgaaatgtattaaaaaaaattacagtttagaatcaaatacaagcaatattatttattcgagaatatttaatttatctacattttacagacgataacaactcacttctaaaaactatactgtaattttaaactttacagttctataaatcaaatgttaagtcttggattcattctattaacgtataataggagcagttgagacaatacttgcctcaaccgatttttatatctctttataattttttgcagtaatgactgtttcaaactcaaaggtttcgggtagatgatctgcataagaatattcaaaagttcgtccatccgttaaataagctacttgttcaactcgcattaggaaatcctgatttgttaagttcataaactgcttttccctatcatgtgggcgaattcctttaaccctgacaacagatgtccctacttcaagaccaagtttattttgaatatgtgagtatatcgactcctctaaaacagaagcctcaacacctgggataaccgaaattggcatccatgtatgctccataatcgtcggaatgctgtgaatgatgcggaggcgaatgattttatagacgaaatcaccgattgaaactcccaatttctcagcaactacttcatcagccccaacaatcgcaaactcgataattttactttctacctcactgccgtatacagctttcgtacccgttaaagtttgaatcattcgtgccttttcctgttgacgccaatcttgcaccactgttccacttccgcgccggcggatgatgtagccatctctaactaatagatccagcgctttcttaatagtaagggctgaaacaccaaattcttcagcaaggacggggctactcggaattttttcgttgattttatattcaccatctaaaatttgctgtttaatcttttgataaatgccgaggtattttacttgtgttgatccgcttgccatttccatacctcctttatactgcaaactctcttctattcattcaaatgtaaagcctcaagtttgtaaactgaaggtgatggggcagcaaatccattttctaagatttcaatattcgttaccgcttcttcgtctttcacaagttttggtgcaccatttataattgtttcatacgcggcatcatagaaacgaccgtaatcaccaagtggcgttttaatttgtttttcaatccagtcaccatttgcattacgatacttagcaactccatagtacatcggtgaatcttcaccaaatcctgcactctcaggcataacacccgctttcaaatcattttcctgctgatcttcaccatatttaataaatgatccgtttgttccatgaacgataaagcgtggataatcttttgctacgacatggttcgttttcagcttaatcttcaactgatttccgtaatgtaaaccaacatcgaaatagttatcaaccgcaccttccatttcattattacgaatatcgtatgtcaccgtatctggacggccgaatagtgaaatcatacggtccatcgtatgaatacctaaactgtaaaatgaaccttcttcttttggagcttcatgagtgattgaaccaggacggaaataatcaatatgtgattcaatctcaataatatcaccaaggaacccttgttcaattacttgcttcacagctaaaaaatcaccatcaaaacggcggttttgataaggcataactactacacctttttctcgtcctaaagctaataattctttcgcatgttccactgtatcgcaaaatggtttttcaacgataactgattttccagcaagtataacttttttcgctaattcgtaatgcgtatgtgctggcgtacagaccgtcaccacttgaatttccttgtcattcaacaattcgtccaaatcagtagtgaagtaaacacctttttccttatatggagccgctaatttttcatttatttgacgtacaaaaatcgtttttatttttatattattacgcgtgtttacataaggtaagtgatagcggttagctgactttccaaatccaataaagcccattgttaatgtcatatttttcaacttccttgctcataaattttcgtttctatatttattatataatttaattattaaaagtatatagttttaaatttataattatatattaaataaaaaatccacgataaaattcgttctcactataagttatggacctataaagtgaaactttaatcagtggggcgatttattctctactgattatttacccgtaaataccgagatgaaaaggagcgtaatgaacatggcatatactactatatctatggaaattttcggatcaactgaacaagtatggcaattaatcggaggtttcaactcccttccagactggttaccttatatacctagcagtaaattaactgaaggcggtcgtgtacgtcatctagctaatccagatggtgaaacaattatagaacgcttagaagtattcaatgataaggaacgctactacacgtattcaatcatgaatgcaccgttcccggtcactaattatttatctacaatccaagttaaagaaggtactgaaagtaacacatcgttagtagagtggtctggtacgttcactcctgttgcagttagtgatgaagaggcaataaatctggttcatggtatatacagcgatggactgaaagcattgcagcaagcatttctagattgattcatgtaattgattgagacgaaaaagttaattaacagtcaaacattcgactttgtggttaagttcattatgaaagataaacaaatacaaatttcatgcctgcttgttaatgacaagaaataaaaaatactacctccaaatggaaggtagtatttttttattaatcaggaaaaacaattaatccctcttctttttcttgctgttttaaatcttcttctgggaatgttacagttgaatttttatcccctgttttttttgtttcttcacctggaaatacgaaagttgaattttcttttccttcatttttttctacgttatctggaaataccatagaatcattggtagttaaatcactatgaaaaccaaggttagacaaaatcgcttttaaatctggtaaaacccctattttatcagatgatgggtcattagattttgtgcctgtattaggattacttaaaattgctctcaattcttttggtgtatatgccttacctaaatgttctttagcaatcccttgaattgatacagcagccccagcgattataggcgaagcgctagaagtaccacggaaattagaagtataacgattcattatactctgatctgtaactttttgtcctttactattttgattttgatatgtatctaatgtatcaacatactctccccaaccatatacatcaattctactaccatagttagagaaacctaaacgtttatgaggaactcttgcagtagatgctccaactataatagctcctgaatctttaaagtctggactatttcgatttaaaatctgtttaccattacggtctttaaatttatctaaatcaatcccaccattaccagctgcttctacaataataatacctttatctgtacctttacgaattgcgttaaatatactcgggtatacttctactggtaaagggtcatctccatatccatcatatttaaaggattcttctattaataaaacatctccagcctgtaaagaatctacggcacttaaaatagcatctcttacatcgattctcccattatctcggatcactgaaattacttttgcctttgcttttggtgcaatcccaatgttcccaatcctattgtcagctgcagaaacaacacctagaactgaagtaccgtgagaaagatcattactcatttttccagacataaattcaatattttgaccgactaaatcttcatgatttaataaccagccttcttccaaatctacaaaggttgctccttgaccatctcctcctttaattccccaagcataaggagcattaattcctaaaggtgcctcttcaagatatccctgtctcaaaaatctaggttcatcataaggattgattgataatacaggcaatctcgagctagttgttgtgtttatactcttattagaacgaaattgtattttactagaatcgttattggcagcatgtactgtatttgttacaaatgtcgtacctaccccagcaaaagttgtaattgcaagtgatgatatcaacatacctttaaaatttttcatctttccacctctagttttctattagaattaacatatttaataatgtgtatgaaccgaaaagctttttatcttattataaaaattaatagatttttataactttttgatttacataaaaactcctttcattcttgtaattcaatgtgtatatttcaaaataacaaactaactgtaactattatagttacacctttattgattttcaactacgaaatataaatttttaaaaataaatttatattactttaaaacagagctaaccttttacgcatataaaaaaaacaaaatatctgtgcaaattacagcggtgaataagtttatagactgcaaaaaaacaagaaaaagcaaaacactaagtgctttgctccttataaaattccttttaacttttcaccaattaacctcgctacatactcatagccttctggtccaaagtgtaatccatctttttcaccattttctacaaatcttttataatcccgttcttgaatcatttcagcgaatacgtttagaaaataacttcctgtttccctcgccactttctccaccacgtctgcatactgaccaagcactctatttgttctattacgctgtttttcttcatcaactggtgcaggactaatcagtagtactttatctgatgaaatatggttcacaatcttctctaagttttctttatatgcttgtaatgacacttgagaaaaagaaaccgcatcattcgtaccaagaaaaactgttacgaaatctggtttatatgatattacatcttcttcaatcctatttaacgcatcgaatgtattatcccctggaacacctgcattcactactttccacttcggaaacatctcttgcaaacgtggtgttaatctcggcattccatcaaaaaatgtttcatcagctgtaatactatctccaaagcatactaacgtttttattaagctactctccttttacgtatgaaacaactttccttctattgcttttatatatctttcagcagaacgttcaactgcctcatttgcattttcttttactactcgatgaaaagcattgtataaacgattaaactgtaacggcttcactcggttcaccatttcttccacttttctcgctggtaatggaattaagtttggatagctatacataaaacttacccaccgctcatccgctacaacttgaataatatcacctgttaacaaaatcccttttccatcattaccttcttcccaatgcaatacagaaccaccactaaaatgtcctccaagacgatgtacagtaatcccatccgctaattgtaaagactcaccagaccaataaataatacgactacttgggcgcatcacccattctttatcatcttcgtgtatataaattggtacatcaaatgtctctgcccattctacttgcgttgaataataatgaggatgagacaatgcaatcgcatctaatccaccaagctcttttattttcgcaattgtcgtttcatctaaatacgtaatacagtcccatagtaaacgatatgactctgttttcactataaatgccgtttgaccgatcgcaaatcctggttttgtcgtaatactataaagtccattttcctcttcgattattacatttttatatgtatcatctgtttgcaaattttctaaagtcgtccaagactgccctttcggattcacatattgcctctcttcatcacaaatatgacaactcaccggttcctctacactcgctgcatactgcacaccgcacgttgtacaaacgtaatttttcatcataattccccctatccctatatttttattaaactgatttttgttgataataatctacttttttattttcaattaataaacttataaaagtaagtaaataaacaactgtaactgacaatggaattacagtaaatcctttttcgcttctgcaacattcatctcactatctccccaaaaatatttgtgctataaagtcacctcaacctcacccatccaataacgccaagctgctaaataatcttctaaatctttcgggtggtgccgtaaacacgtatctatacgcaaatataatcctatgactatttcttcatataaatcacggtcttttttatgaaatacacattgtttcatcgcataatcgattgtttcttttgttaaatcttccggggttgaacagaacgcataaattaaatcatatataggatctcctaacactggtaaaggatcaattacaccgtgcagtttattctcttgaaatataaaattatgaaatccaagatcaccatgcaataaaaatggctgatttattccagtccccctacttggactatttgctaacttaaaaaccgttctatactcttcctcacttatgtaacgtcttacattttcatgagcttccatcacatttgtcgttaaaaattcattccaagattgaactgggctttctttccatccccagccatcaacctctgtagctacttcatacttattgataacttcctttacaagtttactaagaacactccgtttatggcctagtttgcaagaagttgtgccctcaaggaatgagtaaacaatatagcgatttaaaggttccttatataaaagctttggaaataattcgtcctttttataaaactgaagaaaataagcttcttcacgtatgacatccgattcattcaactttataacgtattgttcatctaacaaatatatagtacttgtcgttcccccgtttaatgcttttacgctatttggataatgtgaaataactttttccttaactagttgtgcagtgattattgaaatgtccattctctcacccttcaactccgaatatttccttaattcaaaagacaactttactatcatttgacaaacaaaagtaaaatcctttcaatcgccctgatataacaaacaacaattttattttattacaatgactttcttcaatattccatttatgataacgtgattttatcactctaaatgctcttcatatactctaataatttctattgcagggtctctgtcttgtaatttatgagccaaactttctacaccaaacacttctgtaaacgtatgactacctacaattaaattaattcctttaaatttcgcatgttgcactgtatataatgttttttcacctgttatgtacgtgtcacatcctttttctaatgcacgttcaatcaaatttgtattatttcctgcaccggttaagattgcaatccgttttactggtttatcgtgatttctccagctcttcactttctcttccattttttcttcaagttttccaactaagtttgaaaaaggaatggcttctttatattctcctattcctggtagttcttcttcctcataggttgaatattccagtattgtatctatcctaatttcgttaaataacgatgtacacgtgccaaactttacaaaatctaacggcaaatgaatccaaaaatgattcatttcatattgcttcaatttctcaatacatgcctcttccataccaaataaaaaactccacggcgcatgatgtgtaactatcatatcgactccatttcgatacgcttcttcaatagtttctaacgttaaatttgttgtgtaaccgattttgtgaaattcatctttacttatataagtaaaaccatattcatcatcgccatatttatgaagatgctctccaaatagtgatgttatatgttcattaaattgctttatattcatttttatttctcctttcatttacttttatatttcataaataaggaaatactaaattacaacgttacatacatataggaggacaatatgaaacctgaatttttaaaagctgtacatgatgcaatcggaaatgtcgaacacattcatatagaggaaagcggtgctgacagcttacttattcatcatgatgatgcacagcagttacaacaagttgctaaggcgttagaaaataataatttccgctccgctttaagaacaactggaaatgcttcgtacattgaagtattgaacagataatgaaagtccggatgtattccgggctttctttttatcccgctattcaccgggcagtaagaccccactgattaaagttccactttatattgaaacttcaaactctttcacatacaccgctgttccagcaatatctatttgtaacttttcgttttctatccctttcgttacataaacagttacacgaccatctttatttatttcctgtccttgctcaacgattaaacccaattcatgttcaaaacctttctctaaatactccacataatacgctcccattacacctgaagctgttcctgtcactggatcttcaatcgtcccagcgtaagctgatgaaaaatgacggccgtgcatttgtgctagttcatcataagtttctagacaaattgggtgaatagaagcattaggtatttcttttaatactgatggaaatgcagcattattaggtttcattctctcacatgcattaagatttttaatcggtacaattacagtccaattaccggtacttccatatacaatcggtaaacttacatctaaatcatttacttctaaaccgatactatgagctaattcttctgttgaacctgtaaattctttaaactgaggtgctgcctgtctcattttaataaaggtttctccattttcatttacacctatttgtatcggtaaaatcccagccttcgtttcaatcgtaaggttacttttctcttctaataaacctttttcgcgcaaggcaaatatcgtccctactgtcccatgaccacataaatccatttcaaaaccaggtgtaaaatagcgcattcttatatctcctacttctgtggaaagaacaaaagttatttcgttatatccaactttttcagcaataatttgcatttcctcttccgttaatccatctgcttctaatacaatacctgctggatttcccttatttggtttattcgtaaatgcgtcgtaatgaaatacatttatagtcttcattttcttttctcctaaccttctttaaagattttataatacagctctatctccgttttcaacgaacaattatttctccaaaatatcctctgcatcttttcatttgaagtatgtgtgcttccaatgtaataagtagcccctatttcctttaacatatgcaacgattgaaaatgcatatgggaagcaattcctttcccccgataataaggcattaccccaaaataaaataaccgtccttcactttctgttccagtttctatatgcggtatggacataccaatcggctcatttttatcataaaaaacaatacatgacttttcccagcccgtacctaactctgtttgcactgaataaaaatgttcattgatagttaaaattgaagtttgattccctgaacccgacatacattgttcccaaatatatttaaattctttttccgataacgttccttctgctattgatcgatatgtatattgtctttcaagcttttctacattattcaattctctacatacttctatctttgcggcatacaaagaaaaaccggcatcaagtaacactttcacacttgagttataactactaaaccttttgtttaatacaatactcgctctttttaactcccaattaaaacaaacctcttccaatctacttatcttttctttatatgtttgtacgttatacaaaacatcttcttctatttcttcaatcgttactgcctttggtaagccatttaatatttttttagaagggccaaataagtttttgatgactgtaagatcgtacttcaccactgcacctccaatctacaatttctatccgtaataaccactctcatatactcatctccttatttttaaaataaataagaaaatccatccacttaccattctctaatgaaaacgcctttctcttgcattcaaatgaaaagcctgctctttccgcaagacgaaccgatggctcattatcaacacgtatatgtaattcgattctatgaaaatcaaggctactaaaaaataacggtaacgcagctttcacactttcaacaccatatccatttctccaatattgattatgtatggagtatcccatcatcgcccattgatagtccatacgtaaaatttttattagctctagctttccaatattagccccatcttctttacgaaaaatacctaatacatacatctcatctcgatgtgctgcttcatcaaatcctctaatccattccgtgaaccattcttttgttgatgatgccataacttgataaccatcgtcgtatttatactgagatggcagcctcttattaaatccatctaaccaactttcataatcatcattttggaacggacggatcatgagtctctctgtctctatctgtaatagcggcagcttcatttacatctcttcccttgattaatatttgaatattctttattatcttacacaaaatacaaaatctagtaaattattatgtttttgataaacatgcttctattaaaatacaaaaggaaaccctgttctaaaggatttccttttgtcatcacactaccaaacttatctgtaatttaaaacgttgtattctgtctttaatattccataaacatcaacatcttcatatgtatttaataaaagtctattttgtctcaatgtaccttctttacgtaaacccgacttctctaatactttaatcgacgatctatttctggaaatggcagatgcccaaattttgtttagacctaattcgataaagccaaattgaatcattctgtttacagcctcagttgcaaaaccctttccccaataattcttaccaatccaataaccaagttcacctctattgttacccttgtcaattcttagtgtaattgtacctacaatttctcttgattctttagagacaattcctaaaggatattcgattcctttcctaataagttctggttgcatatcaacccaatcttgcgcgaactccagtttatatggatgcggaagcccaagaatattagctaattccttgtcattagccaattctttaattctaaaaacatcatcattggtaaaaggttctatacataaatgctcagtttctaattttatagccatcttttctcccccttgtactgaaattagttagatccctttattttcaatattacaccaaaaacacaaaatttttaaaatctttatgatatctactaacagaaccataaacaaaaaatccagttatgctttgtacataactggattcctcattatctaatgttttttattttacaagtacattttctcttaattccctcttcaacacttttcctaaagcatttttcggtaactcttctaagaataccacttctggaattttgtaacttgctaacttctctttacaatactgaagaatactttcttctgttaatgttgtttcgccatccttcacaatgtaagctcttggaacctctccccaaaagtcatctggaactccaactactgcaacttctaaaacaccatgtatttcatgaataacatcttctacttgatctggatatacgttgtcaccaccgcgtataataacgtctttatatcttcccataatatgcaggaatccatcatcatctatcatgccagcatcgcccatgttaaaccagttatcttttactaccttctttgttgccttttcattattccaatatcctttaaacatgtatggacttttcacatgaatctctccaacttcatttgttgttagttcatgtcctgtttccgggtgaacaattttcacctctacatttttcaaggtctttcctacagaagacatcttttcttttcccatcattggatgccatgaggttacaacccaaccttctgtactaccatagccttgcaccatatatatgcctttttccatatatttttgaatgagtgtttctggcacttttgtaccaccgctttgtgctactttaaaggttgaaatgttacgttcttttttatttagttcatcaagcatgtaactataaacagctgggaaagcaagcatcgtagtaattttctcttcttcaatcttatcccaaataagagcaggattcgaatcagctaagaagatcatcgtaacgccatgataaatacaatttaaaatagaaagcacgccactcatatgaaacaatggatgcacagataaaaagcgttcacctgctgggatttctctttgtcccgcaatttcagcaaaataatgatgtaagtttttatgtccaattacacatgcttttgcctgtccagtcgttcctgatgtaaacaagtaaatggcatcgtcttcttcatgaacttctacgttcggttctgtcgttggctgtttttgcaactctaattcaaatgaaccaaagccttcttttgttgtttgaattacataaggaatttctttaacagcatcaacctttaataacacttcattaaattcttcatcaataactaacacttttaatttcgcttcttttacaatcgtttctaattcataaacagtcagctgatgatttagcggaataaataccgctccaatttttaaacttgccatcataacgcttggaaatgggtgattatttttgcatagtattcctatacgatctcctctttgcacaccattatataacaaataatgtgcaaactgatttactcgttcattatattgctgaaacgaatatcttttcttcccccctacaagcgcttccaaatttggtgattgcattgctctcttttgtaataattgtcgcatcgttctcaagtaaaactcccctttatatatgttaggttttttattttaccagattaactattaatttactaaagattacacttagtgaatataaaaagaatataaaatatccatttactttacaagtaaatggatatttcccattatatattagaatacttcttgttcatcacatattgcacatactcaggtgcacttttatcaatctcttcatcacttagtttatattctgcaccatataaataaaaggaaggtataaattccatacctgtgtataagcatgtagcttggaatggtttcgtcaactcatccattgtaattccactattttcatagtctttttctaatccacctatagaaatagccacaccaaattctttccccttcactttatctcctttagatccgtacgcaaatccatatgttaatacatcatcgaaccatttttttaataatggtggtgaactgtaccagtaaagcggaaattgaaatatatatctgtcatgttctactaataacttttgctcttcttcaatatcaaactcccaattcggtgccactttatacaattcatgcaccgtaatttcatccgaatatttctcaagttcttcaatccatcttttattaatttttgatttttcaatatcaggatgtgctacaattacaagtgttttcatcttttttcatcccctttataaattattcaaccctttacgtattagtatgaatgagtcacatataattgaaaagtacgtactttaaagtgctataggaaccttaaagtacctgtggaggtgttatatgaatcaaaatgataattgcccaattgcaacaacactcgatgtaatcggtggaaaatggaaagttcatattttatgtattttgtcggatggaaaaatgcgaacaaatgaaattaaacgagaaatcccaaacattacacaaaaggttcttacacaacaacttcggcaacttgaagctgatgggattatctatcgtaccgtatatcaagaagttccaccaaaggttgagtacacactaagtgaatatggaaaatctttaatgcaaataatggataatctgtttgaatggggaaaagatcatcagattaaaagattacatgactaaaaaagcactatatactttgtttaatcctctacgttcatattttttatttctataaagtttattttcatcattttttagctaacttgttttcttagattgatggacgtgaccccacatccatcaatctaaaaagatacaattagaaaaatgagatttctataaagtttcacatataaacactacttccgcctcattaaacgctcgctctactttttctaatctcaattgtacgtaagctataaagaagcacccctaaaccgagaattttttcattattagacgcattagaacctaaggtaatagtaggtacatttaaacccataaacctttcactccgttctataggcatataaaaagatactccttaaaaataaaaaacgctattctctctgtaaaatcatagaaaagaatagcgctttttattttgaaatagaaatcatcatttaaactaaacatgctaatattgattttgtgcgattgtcagttacctcataataaatttctaatcctttccgagtacctgtaaccattttagcagcttttagtttagataaatgttgactaattgtactttgaggcatttgtaaatctccatacattgttgttacattagtaggaccttttgcaagcattatttttactaaagatagacgaactggatgcgccaatacctttaacacctcagcgatttcttgaaacatttcttttttttctttcatcttatttctccccttttatatacatatttatgttatccatatatataattcggaggtatatgcgtttttgtgtccgtcattttaaaaaaatataaaaaaactttaatccgaaactaaaggattagcttaacataatgtctcaccattaatgatgaataggaatctcattatagaagcagcagtttttatactacaactctacattcaactaactaaaaccaatgaaaaaaagagcagatagtctgctcttttatgatgcctccttatgttccgtggaatgtttaacactccccagtctctttagtttattccaccctaccgctactcctcgaagcgatgagaatatagatttaatgacaacataagtcataaattggcgataaataaaacgttgtaaaattaaccatgccaatggttttgggttctcttcctctaatttaaatgcgaacagagaagcgagaagatccattaaaaagaaaacaagataaaatcctaaaacttttagcggattactactaaatagtcctataatcattaatatatctgcaaaaggagcaatgaattgcagcacatattggaataaccacatattaggcagtgcaataaatcctaatgttttatgctttggattacataacgcttttcgatgtttccaaagacattgaagtgtaccatatgaccaacgataccgctgtttaatgagacttttcacatcttcaggtgattccgtaaaagcatgcgctttttcttcatatacaattctatgcccttgacgtaaaaatgtaatagtaagatccgtatcttctgctaacgtatcttcgcttaaatatccagattcaactacattctttttgcgccacgccccaatagctcctggaactactgtaatacaatttaactcatcaaaagctctacgttctaaattaaaccctgtaatgtactcaacatgttgccaagtagttaacaaattccgtctattccccactttgacattacctgaaactgcagctacattctgatcttcaaagtgtctaaccattagagaaatggcgtcttgcgcaataatagtatccgcatctaaagtgacaatgatttctcctcgcgattgttgaaaccctaggttcattgccgatgatttcccgccgttttctttctgaatgaaacgaactttagggtgtttataaaatgtttctttcattacttttgacgtaccatctgtcgatccgtcatccacaacaataacttcaaattctctataattactatccaaaattgagtgaattgtcttggctatcaccttttcttcattatatgctgccatgacaacactaacaaaaggttgataggacgaattaatatagcgagataacgtttttcttttctgcttccatgcaaaataaattaagaataaaaatcgaaaaatccctaatccaatagcaatataaaaaatagttgttaatatatgcttaaagtatcctgcccctgaaaagacagctttattgtaaagtaaatattgcttcccctcagaagaaacaggaggcatgatttcatctcgttctttattcattaaatctgaaattgttacaaaactatatccatgcttttttaggtctttaataatgattgggagcgcctctactgtatgtgtacggttccctcccgcatcatggagaagaataatatttccctctcccttataaatgggattaagagcacgctttactaattcatttgttgatggtattgcccagtcttcgggatcaactttttccgctaccattgtatagttcatattttgcgcacgtaaaataggcaatatttcatttgatgaatccgggttagcatccgcttcatatggcggtctaaataaaaccgtagaatgtccagttacttcctgaattaaacgttgcgtcgtattaagttctactttcgttcgtagtaaagacgtatctgctatgttaggatgcttgaaagtatgattgccaatttcatgcccttcatcgtatattctttttacaatactagtatttagttgcgcgttttcaccaagtacaaaaaaagcagcttttatttgattctcttttaatatatctaatatttctggcgtatatttcgggtctggtccatcatcaaatgttaatactacttgtttcccatttggttttccatatcgttgcacttcatatgcagatggtaaggattgatatacttcatctgtaatataatcatctttgcctactttaaaatctctcaatccattttttctttcattctcaatctgtaaaatttcaccttgtccagaataattcacttcatctaaactacggattttatgtaatacattaggatttttttgtacctcaataggattttttaaaactttccatattgtaggatcttctgctcctaatctccatagcgcaaacccctttgcatgattgtccattgcgattttcacttgattataaagagtaacaccgtctaagaaccaagcagtatgttctttctctcctgttttatatctaaaatacggatttccactcaccttatcccattgaatttttatatttgaatcatgagccattgccataacttctgagaaagtcatagactttgcagcttctttactatttacttcccaatcatatccatagttaccgaaagcaactacaagtttatcagacggaatattcagttctttcaatgtatgttggaaccatttatttgaagcaattggtcctggttccccggctccatagtgctcatcgtacatcattacaatcattcgatctattatttttgctaacgcactataatcaaaagccttatcattagctggaacatcttgtgtaacgagcaaatcatgttcatgaaattccgtagtaagttctttcataaaatttgttaagttttctctatcactttcaggtacggcctcaaagtcaatattaatacctgaaaactgattttttttaacttggattactaaatcattaataaactttgtctttacatcgtttgaggaactcagtaacttatgaattagcccactatcaggaccagaagcttcctcagtatagttagtaagcaaaggcataatcttcacttgatttttttctgccaactttactatctcaggttttatctcacttctaatcgttaaatctgcttttaaatgataccactctggtactaacgtagttaatgaatcgatattttcttttaaagaagcggtactattttcatcccagtttacataaaaaccatacacttctttaggatgtttactatccttcggcggattcaccaaatttttattatccttcgtttcggtatttgggttaaatgcttcctcctttaactgctgatcactaagtttttgattaattggtacaagtttagtatcttgttgtacagcggtattcatatttggaatttctggtgttgaaaaaatactttgaaagaaaaaataaaatacaacacttacactaactattgagatacatagaaaccaaataaaggctatgtttctccttcctttcggatcataaaaaacaggtttttctttatctttctcttgttgaatgtttttctccattatatttttcacatactccttcttaatagaactatagaatattaaagtgcaactttaatcagtgggggttttgttcacccccccactaatcatcagccctcaccaatcgggctgcccagcaaatagcggaataaatccttttagctttgaagtgaatctctcacttccatattctattgattcttcttttcattcccttgctggtggcccctattttcttgttgagaccccctaccattgttcccttgctcgtttccgtcattttctttctgggatcctcttccattgttcccttgcccatttccattattcccttgttgagatcctcttccattgttcccttgctgattcccattatttccttgttgaggatttcttccattgttcccttgcccatttccattattcccttgttgagaccctcttccattgttctcttgctcatttccattatttccttgttgagatcctcttccattgttcccttgctcgtttccattatttccttgttgagatcctcttccattgttcccttgctcgtttccgttatttccctgttgagatcctcttccgttgttctctttcctatttccattatttccctgttgagatcctcttccgttgttccctttcccatttccattattcccttgttgagatcctcttccgttgttcccttgctgattcccattatttccttgttgagcttctctactgttattctcctgttgattccctctattttcttgctgagatcctcttccattgttttcttttatttgcttcgatggctgttcctctgttttcttttgttctttctgctcttgcttttcatattttttttcttttacaggagacaaatcgagtgttgcatcaggagatgactccgggtgtgattgcacctcttcttcgttttccaccggattagacggggtgacaggaggcgtaagtgatttgttcttctcattctcttgctttatataaacacctgtgccaattccagcttttctagcattctctcgtatttgcattgtgctactttgatattcaactgtaatatgttttagctcatattctttctttaattctttcattgccttttccaaaagtggttctagtgccttgtcctttgcaacagctgttagcataacttgcttatcattcgttaaatacttatcctcttgactttgctttataatagtacgtattacttcttgtaattgtttatttttccattgcttcaattcttttaaaatacgccttccatcatcattacaagcctgcaaatctataacacgaaaatcctttgttacgctcacctctaaacttggatttatatcaactgagacgtaagcaaatactttttcttctggttggttgtagaaaaacagcactgcaaatagaaaacaagcaacaagtattgatgcaggctttaaaaaggaaggaatcgaaaaatgcgatgctttttgttcttgctcatcaaacgagatttcctccccgattatgcaagaatcccctcttcttttacacgtaataaactctccatttggtgttaaaacaactacgctatgcttttttatatccatcacaattcctttattcatcatgcttttcccctcttatgtaatccagaatatatgtatagttgtttgcaaaaataatacacattgcaataatgtattttctatgtcgttccaacgttttacgacttaccctaacacgcggttcaatctgtttaagcggtaactttttctttcggaacagctcttccatcatttcctcttcttttataattattttcacaatttctattaagtgctcacgtgtatcacgatgcttaggagattctttagcaagctctgagaatgtgattttaaactcagctagcacactttgaaaatgaagaatttcctccttacggttactattttccatctctttcatatactccgtaagcgacacttgcatttctaacatttcctcttgctcatcttcttttaaaaagacaaagttatgtttagactccttacgtatatagtcaattacatctctttttataagaagatcagcaaacgctaaaaaggattttccttttgtataggaatactgttcaattgcttcgttaaaagcaaacaatccaatgctatattcatcatcctgttctgtaatatatcgacggcagacagatgagattgattttctaataaaaggctgatactgtacgataaacgcttctttgtcttcttcgttgttttgtatgttatatacgatatcttctattttcggttttcttaagatcttcattactaaactcaacacttgtaatctcccagcctccttcaaatagcaaaatggccactacacaagtgaccatttaaccagattttcttggtacttttcttcggtcttgttttcttgctgttagttatatttttcgagtctaacttttcccaacgttttcttaataattttccttttctctcggcactaaagttaagtttgtatttttatctactttcttattttctaccgttcgttttgcttattctctttctattttatctgcaatccttgaataactcttctctatataattggtaatttcatccttccattttggatgccacttaatctagtaattttattaatacttctatattctttcatagtcatttttcttctatttatttttttcactatacatattcggaggagtacaaagttttatgggggtcaaaaaatattttcataaaaaaatacatatttatttcaaaaataaaaaccatcaatttgaaaaagggtaatcaaattgatggttttcttataatatctattaaattaagttggattctcattatatctaaaaaagcactaactattttctaccggttttctccatttttatctttcttggttatcataatatgtcttatctgcgtattttctatcatttccttttagataagctaaaattacttttggatttttaagtaaagtccagtctccatatgtatcaaatcttctgcatgaagtcatcattccatttttaattgtaccgaatttcttattatttcgctttccccatttttttaaccgtttggcaaaatcagcatcttctgccataagcatgttttcattaaatccgttgattgccataaagtcttttctatagcaccaaaaaatccctacagatatagctccatacttaaaaagtaagggaattattattaacattgcggaaacgaatattcctaaggacattctttcaaactttccagttaccccaccaccaatgtatttgcctgaagctagatgtttatctacattagacaacatagactctgtcatttgggtatcagcgtctatagtaatgattatttctccactagctatttgggctcctgcatttcggattttggataagtttttatcgttattttttaatgtaatacagttataagactttgctatttcctctgttttatctgtgcaacgatttaaaacaactataacttccgtttgctctttatatgcctctgatgcctttgcaattgaatctaaacattttctaatgtacttttcttcattgtgtgcaggaattataatagaaaacttcacatcttttttcaaattgactcctgaagattcgtttgtctcagtcataatatgccccccttattttataaggtaaatatctgttatacataacgtatattaaaattcaataaattatatgataggaactgcaggtaaactattacttgagtattaaaaaataaaaacgttattctttctaaataagcaaaattactagaaagaataacgttttttattagttacattaatattttattcgttgctttatttcttcaaaacgagcatgtataatttttctgatatctggatgattcttatataaagtaacagtatacatgatggaagatgcaagaatagtagaccatattaaccaatctccagcatgagaaagaactttaattatttcactcgtaaattcttcctgtccgtcatgaaatgtatagctgagtagttaccttatttttaaaaaaacattctgattatttctttttcacttcttctacaaattcccatgtctctccgttatcttttgattgataaagtgcactactatcgccattgtagtctccatctgccccttgtccaactaacatattaaaaaccccatctttctcatatggcatactaggagaatcaaaaggacttattgtggactgtgtatgatctaatttcacttcatgcggcggatattctacctttttgaaagatactcccccatcatctgtgcgatataactctccttcattaccagaaggcctaattgctcctaaaaacccaagtttatcatttataaaaatgattcctgatacactaccaatccccccattaaatgggtctggattgataacctcccatgttttcccttcatcactagtcttgcttaatgaataaaaagcgctccctaatgctttatctgtcatatttagtttataaccaacttctttcgataggaaaaactgttctttttcattctttaaatcttgttgttccttctctttaagcatatcttcttttggaggcgtctttgatttactccaacttgcgtcacttattaaattatatctagcagggactagctctttctcttttccagggacaaatatagatacagtatatccaatgatatcagaagctgcttctttaacactctgcctcttaccatcctcagtaatattaataattccctctgtattggatccccaatttctttttccataataaatcaacccatacttactttcattccattttttgaccgtttgcttaactgggatcgccttaaccgttttaattaaaggttctactaatttatcatcattataatcaggctttgcatatccatctcgtattatagtaatatcttctgatttcttcttattataagagattaaataagtttcttctttcccatcaacatttttcccataaacaaatgtatcaaacgctgtgattgttccatctgaatgaaatgtaagatcaaaatcagttgccatatacaatttctttggcaaaggatattttttatttatatcttcaaaaataccttctactccagatttatatatattattatgtttaagtttaactgacctttcatgttttaacttttctataaaccatgccaatttgccattgtaatttattgcacttttataaatctgcatcccataaaatgatgtaattgcaacaataatgataatagaaatggatctccatgctattgaatttgttaattttttagattcatattctctattttttatcacccgcattgtagtaaatgtagttatggatataaaaagtactatacacaataacaaaatgtaaatattataattcattcttccgtacttacagtataaggccaactcatagcaaaagatcccgtatacaattattagtattggatttgttactaatgacagaagtatcctttttgtattttctctaaatatagaaaccactcctaattatatgaattactgatattaagtatactttattgtaaagtaacaaaaaagctatttaatcttgccgcaaaaaatacaatagacatatgaatattatattcatgttaaaaaggccaacaatccaagattgttagcctctacttcccctattcgtaccttttatcactttacttcctaacaactggaatccacatttcaccaaacactaagccgtttcttttccccatctcaaccgtcgtatttggtccaccaacataagcaaactcatttgcatctggtaaagcttgaccgaaggcgatgccagtcaacttattacttaactcttcagctgttttgtcttccccttttactactaagtattctcccctcggaaactgaattactctagattcttcttctatttgtgcttctgtcatgacacccgcataatacatcattttgttattcaccgcttcgctcacagaaaaaatgtattcatttgtcgctaaagcttttaaagtgtccagccttccatcttctttaacagccgaccaaaaggcttccttttctttatttattccagcaaagtctgtatattcactcttaatttcagttccaatacctaacacaataaagctatctttttcttctatagtataatttttcatatgcaaaacctgcctctttttttattaatcaaacgatttatcttttcatctgatacgtttataatatctttaaaccatgtcaaaaaatgatactgtttaggagaccaacatgaaaaaagttgaacggatcaatacaattatgcgatatatcaacaaccgctcccactttacaatttctgaaatcatacgagaatttaacatatcaagatcgacagctattagagacattagagaaattgaagctatgggaatgccacttgtcgctgaagttgggagaacgggtggatattttgttatgcataattctatcctgcccgttgttcgctttactgataatgaagtgaaagctctttttattgcctttatggctacgaggaatcaacaacttccctacctaaagagtcgtcaatctttagccgaaaaactactaggactcatctcagaaacccagcaggatgaccttgttcttttaaatcaactcttgctgttccaaggaactaatcctcataatcccgatctacttgagctttctgatctcccccatcctatgttagaaaaactcattcaaatccttcttttggataaccatttattgattaccattaaaaaagatgaagaaattaagtcttatccaatttatctattacacctttatcaagaaaaaagccattggattattgaaggatttgacttaaaagaagaaaagaagttaatgtttcctgtcgatgatctcatcaatatcgaaccatacacgacgaataaaaggctcaataagaaaaagattttagaaaaactaagtaagaaggctgaagcaattaaccttgtacttgaacttggtccgacagcaattgcccagttcaaaaaataccatcctttaaaaatttcaatatcttatactaatccttaccaatccacagccattttaaaaacttttatcaatgttaacaatcccgatgaagtgacggaaataataaattggctgctttttctagggaaggatattaaaatcaaagaaatacccgatgaagtattagcagatttacaaaaacgagtgtgcttatacattccataagcagtgagcctcaaatattaagctttatcactggacaattattctatttttaaataccatttcatttactacaatgagagcatgataaataataaaagcacggaaaatctcccgtgcttttctaaatatatattattcctgaaggtttcgtttatctcgtttcttaccctagctgacgtttaaatgctttactagcaaagaagtaagcaataaccataattccgacgcaccaagcgagcgcaatccaaatatcgtttccaacagttccttcatataaaagagcacgaatcgcattcacgattgaagttacaggctgattctctgcaaacacacgaacaatttttggcatcgtttcggtaggtacgaaggctgaactaataaatggaagaaaaactagtgggtacgagtaggctgtcgccccttccatagactttgccgtcagccctggaatgatagccaaccatgttagcgctaacgtaaacattcctagtatcccagctactgcaagccaatctagaatattcgcactggaacggaaacccattaagagcgcaacaagaataactacaacgatagtaagtacattagcaacaagagaggttaaaacatgagcccacaatatcgatgaacgcttaataggcatcgtaatgaaacgtgccatcagcccactctttacatccgtaaagagtcgcacggaagtgtaagctacaccggatgcgatagccattagcaaaattcccggcaataaataattgacgtagttatctgttcctgtctgtatagccccaccaaatacgtatacaaacaatagcatcatcataatcggtgtaatcgctaccgtaataattgtatctggactacgcataatattgcgcattaagcgcccaagtaatacccctgttttgcttttcatttacatctcctcctttttgccaatgatcgcaaggaatatttcttccaatgtaggctgcttctcgatatactccacttttgccggtgggaacatctctttcagttcagtaagagtacctgtcgtaataatttttccaccatgcaaaattgcgatacgatcagccagttgttctgcttcctccaagtactgagtcgtaagcaaaatagttgtaccactatcagcaagttccttgactgtatcccacacttcaatccgcgcttcaggatcgagtccagtcgttggttcgtcaagaaaaataactgctggcgccccaatcaaactcatcgcgatatcaagccggcgcttcatcccgcctgaatactgatctgccctttggtttgccgcatcagtcaggctaaatcttgcaagtagattgtcagcaacttgagcgggactggaaacaccacgtagcctagcaatcattatcaagttttccctcccagtcagcataccgtctaaagctgcgaactgccctgtcaaactgatactttgacgaacatgatttggttgacgctgtacatcaaatccgcaaatacttacttcaccactatcttgcttcatgagtgtcgaaaggatgttgaccgttgtcgtctttcccgctccatttgagcctagcagcgcgaaaatttctccacgctgcacctcaaaatctactccttttaaaacttccttgtctttaaaggattttttcaagccttttatagaaatcgctgcatgactcatacttttttcctccctataaaaatgttttgcggagataatttatttacctctatctatttagtaccactgatattctgtatcacttagtaccgagctaaaaatataactgaatagctatggtggcaattcatatgtgtaaccagctaatcagtcggtattacttattccatttatttttttctcaatttcttcataatactttcattcaaatcttcacgatacttggagacgtaagttttagcatttgccactagttcgtcagcaaaggaagccacgtcatccccagtaatgtcaagcacttgtcttccttctgctgcaccagcttcaaacaaatcgattaattcatactgtatgtgtaacatatccatcccgttacccgctgagaaattccacatgtagttttgaattttcttaaatacaaattggtagtcctctggcagagcctcaactcgtgccatcatcattttgtactcttttttatcaccaattaactttttaaacatttctaacatcttattttcctccttttttataaaaccgaacaagaaattcccaaagtatcggccggaacattttatcttatgaacctattttgacttcaagacgttaatttttgacgatacaaaatcccattttttccaaaacaattcaagctcttggcggccctcttcatttaatgaataaaacttacgaggcggtcccatatctgatggtttcttttcaatattcacaagctttttcttctctaatcgtacaaggatggtatacaccgtaccttccacaacttcggtaaacccaagatcattcagatggcgggtaatctcatagccatacgtttcacggcgactgatgatttccagtacacacccttccagtgaaccttttagcatttcagttaaattttccatgtcctgatcctcctttaccccctattctgtctgacttatattcagtatcacagagtactaaggcgaattttttactgaatagcttttgagtaaaaccacactattcagtattacttattacaactacattgtatgactaagtagttgtggatgtcaactttattttcaaaaaaattaaaaatccgctttaccctaaccggatacagcctccttttttgttgtaagggccatcaaactagtaaaacagagctgattcaaagtgtaatttaaatcagctctgttttattgtttttataccgatatatcttgttttttcacgatacaaattgtttctcactaccattcccattgcatataaagcataaaggcaagtgcgatcagagaaaatttccagagattatccgtacatgatacgagcccctaaaatacaattctgttagaaatctgttctctatattctcttttattttatttctgatagttgattagcaacactatctaaaaatttttctaccttttcttttgatatatccggcgcatgataaccgatcgtaaatgtaagccttccattataagagcttgctcccattgaaaagaatggtgcatacataataggtgatgtcatatacccgtcctcagcttgaatttcaccaaactgaatagattcatcagcgattactcccaaatttgtcagtaacggcaatgccattcccatctgtacagcctgttcatattgctgattaaacatttccttcactgtagatagcttcatttctgccagtaactccattcctgctgctgaagaaagacctggattttgagactttattttatccattgattgtttaactcgaacaagagtctgcttaaatgtttcatcgtcttccattttaatcactggcatttccataccggataaattgcaaatagcaccagttgtattattaggcagatatcgacgtaaatcaattgtcaagccaatcattttttctgcagtgcgcggttctgcatacacagtgaaatgtgataaagctcggaagtatgcagtcatgattacatcattcaaggtagcctgttgagcttttgtccattgggttaaacgtagagtttgctcatggctcaatcgccgtacggacatttggggaaatttatttttgttaggttgagatggaaaagaccataacgatgcctgttgttcttggttaggacgatacgcactttttatgtccgatattccagcgtatttgaatacatgtaattgatctcgacaactctcatttccctcatcaaattcctttataatttgcttcttagaccgtcccaatgaaaggtgagtatatatcgttccaagcaatttaatatattccttgactcctgcaccatctgaacatagatgagacaatttcacaactaacatatctgttgtagtgccccgtaataatttcgtttgaaccataggcccctgaatacgatcaccaggttccttaataaaatctattgccattatttcaagttcttgattatttccttctgcaaaaaagcaaatagatgaattagtgtcagatgaatgttcctcccagtaaggaatatcattttctacaaaccggctgttcaaaactggttgcaattgcaacgttatccttactgattcttcaagtatttccttggatatacctacaggaaaataaagaactgcattaatttgttgatctgcagaataaagacctaatacataattcattcgatcttgtggtgttactgaatactttcttttctccataattccgtccccctttaggactttttgtataaccctattttccatatgcttataatttttctagtcatttttcttcaagagctaataacgcttatttttcgaatttttaacgaaatcatcttctccgtattggttgcattctttttgcaggtgatatattcattattttattgttattaacactgcctaacctcacaataaaaccaaacaataataaattaagtttacatatacgtaaacattttattataacgtctataaattatcaatatagcaaataaatcatttttatgtctgtcaataaaaaataatatattcaagggccacttcatcataaaagattgatgtgcatgtaaatgtacccatatcactttcaaaataagaatgagaattttttcaacaaaataagctgcagttattgattttacagtaagaaaagcccctccattttgaaaatgcgcaatcaaaatgagtagggctatttccaatttaaattttataaaaaaatgattatcataaataatattttactttttagtctaccttattattttcaatccattttcctaataaatgaatggattttattcatataatttgaggtggtatcgttggtttttaaaaatagaaagcttattttcaaatcaaatgaaaaagaggtaaaattatagatattcatgtagaaatttcgttttggggatacttaaaatcttaaggtgatgggcatgtggtgttacactttaaaagctttataaaattataaaatttatagatatagcagattttctttattaataatcatttgtatgtacgtttactcacatacatacaaatgatttataaagctacaattaagtgaaaacatcttttccgttacgataacatcatagccatgtcttctgctacatttgtaattagttttaaaccaaatgtttcttgtaatacatcaagcacgccaggtgaaataaattcaggagcctttggaccgatgcgaatatcttgaatcccaagactaaatagcccgagtaaaatggcaaccgctttttgttcaaaccatgatagcacaatacttactggcaattcattcacttcacattggaaagcatcagctaaagcagccgctattttcactgtagaaattgaattattgcactgtcctaaatcaatgtaacgcggaatttccgtaccaggtacaacaccgtaatccacatcattaaagcggaatttcccgcaagaagttgttaaaataaccgtttctggcggaagtgacgttgctaattcacgataatattctccgccttttcccggtgcatcacaaccggcgataacaaagaaacgctttattttcccctcttttactgcatcaataatttctggagctaatgataatactgtattatgatgaaaccctgtcactaactgttcatccgactccatatgtacttctggaagttctagtgctttttgaattaatggtgtaaaatcatcattttcaattttttgtacaccttctaaacctgcaatgtcatatgaaaagaatcgatcagagtacgatcctttaattggcataacacagttcgttgtagctaatatggcaccagtaaatttttcaaaaaggcgtctttgatcataccatgccttaccgatgtttccttttaaatgtttatattttttcagctgcgggtatccgtgtgctggtagcatttcagaatgtgtataaatattaatgtcttttccttctgtttgctttaatagttcttctagtgcaaataaattatgacctgtaactacaattgctttaccttctacacgattttgtgtaatttgtacaggctctggcacaccaaaatgattcgtatgtgcctcatctaataattccatcacccgtaaagctgatttccccactttcatagccatatcaatatgctcttgttcgttaaagttagaatttgttaatgtcatatataaagcttcttgtgttgtagcatctacaaatgcatccgtatatcctagctgagcagcatgtgtgcgataagctgcaattccttttagcccaaacacaatcgtatcttgtaaactcgcaatcgtttcattcttgccgcacacacccattactttacatccgcctgctggcgtttgttcacattgataacaaaacatatcatcccaccctctctcaatcattcattacaccttaagcataatacccattgaaaaaaagtgatgtgatatcaatcacaataatatataaagatttgtgacagttcatattgttgacataatatttttattgacactaaaaaatatgcattagtgtacacacatctttcgatacttttaaatagctaattaatttggagaaatatatacaacgaaaaaaatttttgaatcccatgtacaaatagttgcaattcatcacatatgaaatagatataaaaatacgctcttctttctatcattcaatagaaagaagagcgcatttgtcattttaaggaactatcattttttattaaagtctttattgtaaacctttttatttacaatacatttacattatcttaacattacttacattatttatatgatatatttatatagaagctacttaagaaatttcatatacattttatctttatgatctcttatctaatcaataaaaagatcatgttatatttttataacaggggtgaattacgatgactgaaactttaaaaacacttataatgcttgatgctacttatgttgttatagcaattatgacagtactagtatttgtatacttggaattaaaatctcagtaatatatgctgacgtaatcaacagattcagcatttaaatatagttagaagaaagagaggagaaaattatttctcctctcttttgtatttctacaatttcttattttaataaatccaatgtatataaaagtaatcctttgttccctacttctccatgaccaggcactactacatttatatttctatatcgcttcagcacattctcaatcgatgtagaccattcatttacataagcatccgcaacgtttcctaaatctttcgcggacgtagatttcactaaacagcctccaactaaaatattgtattgcggtaaccatacgacaatattatcttctgtatgccctttccctggataaaatgtttctactttcatatttccaaacttcaaatttgtaacggtttgtaaatctccaagtggctcttcatatccacttttctttgctagttctgcggttaatgctgtactatgcgctttaattcctctttctttcaacgtttttattccgccaattcgatcagcgtgcgcatgtgtaataatgacatccgttacacgcttctgaaacttcttttctaccatttctattagttccttcgttaatttgtcatcccaagaagaatcaacaagtactaaccctttagaagtattaagaactagaccgttcgaaggaactgcttctccattaaaagaacctaactccgtatgaacccatacattcttgtttaactgagatattgaaatggttcccgtctcattttttattactgttttctctaccttttgtgatgcttgtacagaagaaattgtgctaacaaattgaattgttcctagtaaacctacacataatcctacttttaacaacgtattctttttcatgtcatcaaccctttccttcaagccaaatagttattacctatattagacaatttatcttcagtgtttgttccatataattgaacactttataatcgcggcttatgtaaatacacgcatggtgcagtaaaaaagatcacccaaatggatgatcttttttataatttatcaacatattgcttcgcttctagtaaggaaaaaacaaaaacttctcttactctcttaactgctgtaacttttttgccttcttctacaagctggcgtagttctttattaatttcaggttctctttctacaattcccatttctttcgtaattaattgtaatctatcttcaattctctttaaacgcgcatcatttttcttttcaattgtagctaatttttcagcgatataaatgaaaccaaaggctaatattagtataaccatccagaattccatgaatgttcccccttactaactttcatttgttttatttcactaacttatcagctttagttattgaaatcattcattccttacaaggaaagggcaaactaaaactttctcaaaaatttgtactagacatgatttctcctcaaggttgctcaaaatggactggattaggtgtttttctagatgattctaatgaagaattacagatttattcactcggatggggcgtcggatttcaatgtatgatggtttgttatccatactgcgggaatggtgctgttattatgaccaattccgatttaggtgttcatcaaatggaagggatcattggtgaggttgtaaaaacgttatccttatatagataaagaagctgttccttccagcttctttatctatataacatttttcgcaacaatttttatatgttctggtgcgataatttccgttatactttcttggaaatcttcccgcaacatttcttccaaatgttctaactgcacttcaacatgtgtgcattctaaattatgtatatttaacagtgcataatgatcttttttcttaattactaaatattgattttcctctgtcacaagtacagaacctaatcggactcctaataagcgttgatcatcaaacttcataattacttctccttccctcatataaacaaaactacaatgaaaataattacatttatggaaaaacacgcttatttagactatatcataatttactaaaatagaaatatctttttctgtttcaataaaaatccctattctttcatatatttcgatacaaaaaactttctcaacattaaatttgaattttcagtttttaattccgtaaaaatctattataataaagttaataaatgtttgacctctcctaattcatgtacatatggatgatcagtagttatcgctactgatctatttttttgatttcagaaagtacatacgctgcatcctttcctacaccacaaataagtgcggaacccctttgagattgccatggtaaaccgatataatacaatccttttactggactgattccctttatatgattaggaaatcctttctcattcactgcctgttcaatttcaatccaattataattttgtacaaaaccagtttaccataaagtaaacgctccttcattctatcttcccagtctttagcgcctgtgcccagtcatatctttcttgttgaacagccaatccagcagcttcttcccaattataaggaactgaaatttgttcaattgtccattctcccaaaaccttttctatcactacatattttgcatgcggagttcctgattccattttatgcataacaggtaactcatctttgtatgctggaagtcctacacttcctggatttataatgatctttccgttcgctaaataaacaactctaggaatatgtgtatgaccacatactattattttttgttctatattttggagttgatccattatatttttttcattctttaatattgcaccattctcatttatctcttctaacaaatacacttcatctgaagttggcgtaccgtgacaacataacatatcgtctacaataaattgtgaaggatgttgttttaaccaatctatatgatcttttgttaattgattttggacaaaagttagtgtagcagactgctcttgtattgtctcccaaagcatgcgatcacaattacctttaatatgtatcatctcgctactcattaatatatcgattgtctctaaaggatctaacggcccatacacactatctcctaaatttattatcatttcgaccttgcgacgtgtaatatcttttaataccgattttaaagcgtgactatttccgtggatatctgaaattatagctattttcatcttaatccctactttaatatattatttataaacatccgcagccaattcccgcaaaacttctacattcactacttcaaaacaaccattgtttttgttaattatatttttatcacaaaagagattcaaagtacgtaataaatgccgataactcgttcctaacaactccgctatttccgttaaattcccactaaacacaattctattttcatgctgaactgctcgttctcctgctgctaacatgtaactcgcaagtctattttcaagcggatacaataaattaattgtactgtttttggaaagtcggtttaatttatgtgccaatgatccgcaaatacatcttaaaaatttcgcatcatgaaatagcttatttctcacctttcctaaaggtaaacccacacaatacgaatctgccatcacttgtacgtttgaagtgattctttgagaatgaattaactccacatctccaagtaactgcaaactatcataaaaacacagtaatacggatttcccattacttaatgtgttaaacgctttcgcttttccttcaacaaagaaatataaataatctatctcttcattttctctacaaataaactcattctttttaaaaaatataagttccatatatggcttcatatcatgactaaaaaatgaatcaatattattttgctttatatactccgctaatttaatagaattacatactttcttcatagttccccacctttacaactcatccccattgtaatcaaaattttcttcttccactatgacatatgtcataacaatacacaatttcagcatgatacagtcattacaaatatgaaatataaaggggatattacattgtataactttctttctgtctttattggtgtgctcatcgccgttatgcttccattgaatggaattttatccgagttaattgggaagtatacagcaagcgttgtcattcaccttgtcggtttaattgcagttatcttcattttaatcataaacaaaaataaaattcgtttcgataaaagtattccactttttttatatagcgctggagcgattggagtattcactgttctttttaacaatataagtttctccgtccttggtgcttctattacgatcgcattaagtttactcggtcaatctattgcttccatcattatcgatcatttcggcttattaggaatgaaagttgcaaagtttgaaaagaaaaaactaattggattatgtttcatctcttctggaattataatcatgacaatttattaatgggggcaagaaaatgttatatattacgatcgctattttagctggtgtttctatcgttgttgctagaattattaacgcgaatttagcagcaaaaatcggaaattgggaaggcacgttttttaattatattactggattatttttctctatgttatttttaattttcagttcagattcattgtatattccaatgcagacgttacaatctattcctattgctgtgtacttaggcggattagtaggcgttatcgttatttcattatccaactatattactcctaaaatatcagccttttatttaacattactcatctttatcggacaattatttgcggggactattattgatttcttcctgacaaatgaactctcaatcggtaaagttatcggtggcattttcgtattaattgggctcacttacaatttactcatagatcgcccgataaaaactgtgaagcataaccaagttcaactataatactttacgcttacctatcatatattaatagaaaagctcttcacacgaaataatagagaggagaaaaccctattaaaaaaattattttattgctaggtagcgtattaattatttgtggaattgtatggtttgtaaactcgggaaaatctattcaagatctctatactgcaaacaaaccgaaaaagaaagctactattatttcaagctcgcgagatccaaatgagccccctgcttttttaggaaagcaggaaataaaagatatacatgtagaatcaattaaaacaaaaaaggatatctttctcacaaaaacagatgaattaaaaacatttattaacagtatgaataccgcaaaaaaaggcaaattaacattggatgaagaaggatcagatttaatagattgtgatatgtggattactttcgaggatggaacttataaaaaatatttcatatgggtagttgatcatcacagcagcgaagtgatgattgctcagcaagatactcctgatgatgtaaaccttacgtactatcagttaaacgaagatagttcaaaaaaagtttataatttatttaaaaaaattatttaaacgaaaaagtcatgagcacgcgaactcatgactttttgcactatatatattccgggaacactctacaactcttttcctgctctatatcatgaccaaagaaaataattggtttctcttttttcacaacttcttttaaacgtttaattgaagataaagctaattctggatcaaatcctgcgaacggcacttcatcttcaaaattctctttcgtgtacgatgcatcaatcgttaataaaactgaaccggattgctccgtctcaatgaatagcgactgatggcctggagaatgacctggcgtatacaataattgaacacctggtaccacttcataatccccttcaataattttgtagttcaaatgcggtaatatacattctttcatatattcttctctatgaagtgctgcctcatattccgttcgctgcacaataattggtgtatttgtaaaagcaccgtttcctcctgcatgatcaaaatgtaagtgagaactaataatatataaaaggtcgtccggctcataccctacacgctttaatatattcacgattctatcttcttcagtcattttcggtaagatctgtccttcaacaaatgtaccgttaaaaagcccttcattattaactgcactttctggcatacctgtgtctactaaaataggaccttcttccgtctccaaaagataacaccacaccggcaagtttaatagtttccccggtgttaacgcactgttaacagacgaatgatccaacatgcaacgacctgctgggatgaaataaagtttctttactgtcattatgtatccacctttacatttagttttggataaagtaatacagtaaaaaattcttctttttagaaataaactccttctagactatcagtacagcttgcataaaaaaaagggtatttttttacatagcagtatttcaccatctataatatagaagtaaagaattcttactttaaatgaaacattaacaccgattaacgctgaaaacttaaaaaaagcacatgcactacttgaaagcgggcacaccattgggaaaatcgtattagagaaattttaatcatgatagtgataggtagtatgtgaaattatattaacgatttttcgaatatatctatcacaaatcaaattatatcaacgattcgacaagttatatcgatttatcgacaaataacaacaataagaaaaggctgttccagatgaacagcctcttctttatttacttgaaatctctttattattttgaacgtctaacggagctcgctttcctattccgaaagcatagaaactaattgtaacgatagctaagaaaataatacctacaactaatgaaatgcgtgtatcatcgttaaaccacattccgattaataccataattaaaaaggcaattgttaaatagtttgttacaggagcaaatggcattttgaacggatgatctttcatctctgctcccttttctttcctaaaacgaatttgactaattaaaatgacgaaccatggtaccataccaggaagtacactcgcactatatacatatacgaataagtttttcggtgcgatgtaacttaaaacaacaccaaccgccagaccgataattacgccaactgtaccaaataaaggcacaccatttccagaaagtttcgtgaaatatttcggtgcttgtccatttacacctaacgtatacagcatacgtccagcactataaataccactattacaaccagacattgctgctgtaataacaacgaagttaataaggccagctgctgccgtaataccaaccttcgcaaaagttgctacgaacgggctaccaattgtacttaattgatcccacggatacacagttacaataacgaaaatagcaccgatgtagaaaattaaaatacgccaaattgtactttgaatcgctcttgtaagtgtcttctttggatccttcgcttcaccagcagtaataccgattaattccacaccttgatacgctccaactacaagtgataatgcaaagaagaatcctgaaaaaccacctgtaaagaaaccgccatttgaccaaagattagatatgccaatcgcttctccgccgttaccaattccgaagaaaataaggccaaatcctgcaataatcattaatagaatcgtaacgattttaatcatcgcaaaccaaaattcaaattcaccaaatgacttaacagaaattaagttagctgcaccaagaataaccattgcaattatacctggtatccaagctggtaaatccgggaaccaatattgcatatacgctccaaccgcgataatttctgacatcccaacgataacccactggaaccagttactccacgctgtcatataaccagctagtggatgaatatacttatgaccgaatgtcgcaaatgagcctgtacttggctccatatacaacatttctcccatggcacgcatgatgaagaagatgaaaatacctgcaattgcataagcaagcattactgacggacctgtccatttaattgtgctggctgatcccataaacaaaccaacaccaatcgttccgcctaaagcaatcatttgaatatgacgtgcttctaaacctcttttcaattctttgtttgccacttcacttccccctcttagatgattcatagccgcattttaacacaagatgctttcccctaactcctttcggccctgaaaatgatgaagcaaacgtcattttacactagctttaaagctatcctaaaatcgttttgtgctcctaataaaattctcaaaacctttcatcttccaatattctataaatcttaaaattacttatcttatattaattcattaatctgaaaaattcaattattttttcaataaattattatacataagtctgattaatttttaactaaattaacaataaaatacatctattcaatatgattccggcatgtatattattacaatataaataaccgaggagatgctatcttcctcggtttcatatctcaaatacttcaacctttatagttgataacgtaatttcccacacattcgattcatataccaataagaaatttaatatattaataaactactaacttctttaccccagccaaattttgaggcagaaacctttctgcctcaaaacaacgggataaaatataaaagagtctcattaaaaaatgagactcttttacaatttcatatttaaatcgatttcgaagtttgcttaccaaagataaataccctagtaaacactgccattataactacaataactagaaaataaagtggcatcaccagtaacgagcccgtatgcaattgactcattccccaaattgtcatcgttacaattacatagtatcctaagctaaacaacgctccagctgtaccaatgacatcttgaaaatctactaacgctaaacttaaacaattaggtaacgctactccaattcctaatagcaatataaacatcgctattaaaaatacaaccatatatattacattcggatttgatcccacaaacgtaataacagataaaaagatagctcctcctgtcattacgagacaaccgatatatataattttctctggtttataagtagcaagtaaacgttttgaaattttcgctccaacaatagaagcagacgctacaacaattcctagaaatccatacatactaggcgataattgaaaatattcaataaagataaacggcgcttctgcgtaatagctaaataaaacaccatttgctcctccaattaacaacccatatgttaccactttcggatttgtaattaacctcttcaagactgaaaatacatttattttattcgttactgagcccgtttttgtttcaggaagagaaacaaacgtatacagaaaaataccgatactcataactactaaacttaaaaatactattttaaatccaaacatttgatcaagaaagccaccaattaacggtcctatcgctggtgtaaaagcaatgactgccgagatttgagcaaacataacatgcctcttatgcccttctacactttcacgaagaatcgtttgcgtcacaactgatcctgcacttgctccaaacgcttgaataaaacgacttaccaataaaacttcaatggaatttgcaataaagcacaagaaactcccagcgccgtatacaacaattccaaataacattgcccagcgacggccaattatatctgatagccatccaataaaaaatacacctaaagcaaatccagcaaaatacacactaagcgttaactgcacctcattattacttacatgtaacgcctttgaaatgtccggtaaagacggtgtgtaaatcgtttcactaatttgcggaaatgcgacaagaataatcattaacaaaagtgatggtactgagacttttttcatttttcataccctcctataactttgaaaatctcagaaataaaaagactttccttagctacggaacaggaggggccattatagaaatccggtcataaaacaacaaagaaaacacctcaattacgtatgttaatacttataggagggtaatattaacatcgatttttaaatatactttttcaattatattacatattaattttatttttctagtattatcatttcgaatgctctttttatattagtgaacaaataataaacgccataaaagataacaacttgatatgaacgccttattatggaataattagaaatagtttgaattaataaacctgattataaaatgatagactcatatattcctaatgtcataaagttgaacaagtaggaggactttcgtaatgattgaaattttaaggacagtagtaaacttcctaatttctctattctcaggagaattaccctttgtgtattatgtatggattattaccctattcctaattcaaataatccaatctactctgaactataagctttttaacaagaaaaacaatttcagcacttatatatcggaaggattacttgcttttattattttattgtttggaggaatattagtatctaagttacttgcttacataatagacgattctactattagtatgacgaatttaacacattattttgtttctcttatcatattaactatatttgttgtaataacctgtgttaaagactttatagaggcatctataaagaataaaaatatatctcttttgagctttttagtaatttccttcataacaagtatactttcattcaagtttttatcacctttaattgaaggttctttttctctttctaaatcttttataactactttaatcattctagtaactatatcaatccctctattaatttccttagaggataagtatgcagacgaaaaggaaacggaaaatttatagtttctcatttacataaaagaaagagggagctcccctctttcttttctatcgttctatttcacaagactaaatcattccttttaatattaatcctaaaactgacattattatcgcgctaataataattcgcaaaatccaagtagtgtttgtacttattttttctaattgcttattgattgttgctatatctttctcattaatagtggtacgcgtttctaaatttcgaatgtctctcataatttctttttgctccgccttgagattgtcaattttagcgtaaacatcttccatatattcacaccctctgttcatcttaatagaaaaatctatatatattatgagacaaccctcttatctgtgaatacgttgcgtatatccgcgtaccaaattttttgtacaatctaattgaattactcacacgtttccattcttctatttataaattagcgttgagatacattaaaattagaaaaggaatcccttgtttatttaacaacaaacaaggtgcaatccaccattcgggagcacctacgataatttctattgttttcatatttacaactccatataatcagtatgattttctgaagaagccaatttttgaactgcttaaagtatactaatatgaatacgaaatagctgtattgataaactctctagaacaataaatatactggctgaaacggatctatatccaatattttttccagtaacatgaatggttatttctgataaatgcgtttgtacatcattgttttcaaaaatttcatcctcaacctttacaatatctgcttcacaatctacttctttaaaagttttcaataattttgtttccaataaactacaatcaaagctctcatcttttattacggcaaatttaaccttcatatcgatttccccatttttaacaaactaaaatcactaaatcaatataaatatatattattctattaaataattcaaaatatacgcttcttatatacattattaaaaataggttctaaagaattaaatgaaaaaagaaattacatatacaaatcccctctttcaaccaatcaatatagaattcccttatgcccaatgattaaaatcttttcatattaaagccgtagattctaaggactttttgtttttatattgataagtcatttcttgaattttgtatcatcggaattaataatatagtaaaacaaattaaatattaggcgttcaactaatctttcatataattcgtctcttaattattttgctcattgcgcttttttattttcctcactatttcaactaaactttgtgtaataatacatatttcaaatacattatttcctttcactcatacttttatcattgagtttttattcacaaattcgtaacacatatatatgagttatcatgctaaaattagtttattcacaaaaagaagttcttcttaataaatcaatcatttttaataccctgtttaaagccttgcccccctgcaaggttttttcctatttaaatagagtagtagttttcgttatgcttctctcccccttgttccttaccctacaaataatacttcatatttattttaatttttcagcatccgtactcgctctgttcgagagctctttaccaaatattcaatctaatgataagattgaccaaattaatattttcgtccataactgtatcaaaaagtacactaaagaaaaaatagcactctcacaattaagtaaacgcgagctttttcttctatctacttactatttaaggttaatagtgatataaccagatttaaaaattcgacttaaattcattgatgaatggagaggtttatatgaaattgaaagacaaagtagcaatcataactggtggtgcaagtggaattggcgaatctactgttcgtctttttatcgaagaaggtgcaaaagtagttattgctgacttttctgaacgtggaaaagaactatcagatgaattgaatgcacatggatataatacgttatttattaaaactgatgtaacaaaagaggcagatattaaacagctaattcatgagacagtaagtacatacggtaaattagatattatgtatgccaatgccggcgttgctgatgatgcaccagcaaacgaattatcctatgaaaagtggaaaagaactattgatattaatttgtctggggtattcctttctgataaatattcgattgaacaattccttaaacaaggtacaggtggtgtcatcgttaacgctggttcgattcatagttttgtttcattacctaccccaacagcatactcctctgcaaaaggtggtgtgaaactattaactcaaaatttatgtactgcctacgctaaatatggaatacgtattaatgcggtgtgccccggttatattgacacccctttacttggtagtgttaatcctgaacagaaagaatatttagcttcacttcatccacaaggcagacttggaacaccagaagaagtcgctaaagctgtcttatttttagcaagtgatgatgctagttttgttaacggtacaacacttcttgttgatggaggctatactgcacgttaatttaaaaattttgaagcaccctaagaaatatatagtcttcaacaagaaaaagcgccatcacaagtgacggcgctttttctatgtaagagcaactagaaggtatccttctagcctactcccatttataagtccaaaactgttcaagttgcagccattttaatgttgctgcatctttgttttttatttttgcatgcgtgtcttcaagcattgcttctgtttgtgaacggtgcgcacctaatgcagttaatttatgatcaaatacttcactaatgttatttacaacatccggttctcctaatactgcttcacgatttttcgtaatcgcaacagcatggataactgggcgctcttcttttggcatacgtgatacagcgcgaacgacagcgcggccaaatgcattatgatctggatgtacaccgtgctctggataaaatgtaataattcgagatggatttacttcttgaataattgcttcaattttgtcagcaacgaaatcaacatcttcaaattctaacgttttatcatggaagccaagcattcttaaatctttaatacccatcgcttcacaagcatctttcaattctttcttacggatatgtggaatcgtttcacggttagcgaatacgttcttacccatgttacgtcccatttgtcctagagtaccacatgcatacgttacaggtactccttgatctgttaataagcgaattgttcctcccgcagcatatgcttcatcatctggatgcggaaatacaacaagtacatgtctctccataagtttccctccttcttacttaaatggtgttaagcttaactcaagtgcaactgctagacgacctaaattatcatgtccagctaataataaacgctcttgatcgtctacttcccagtgcgtaataccttcagcatatacccaaccgtgatccattttcaaaccaactcggtatggatttgttccagttatcttcccgcgttcaaaacggataatcgcatttcgaatgaaagcaccaactgtcatcatcttttcatttatgtgtgatgcatacgctccgtttgtcgtttctaaatgaatatatacatctttatttacaaaacgttcaatttcattttgaataagagaactatcttttactatttccatcggaattcacctctttaaaccattttacgcaaaaataatgtaaattgctatctctatattagaggacaacgctcacttttcctaataatttgcactgtgttttttatatgatatgtaaaaaatacattttttccttcactttgttaaatagttttctttcttttttgaatttgctacaatatattttatcccgtattattgcagcgagatacatttcgacaattgaatacataatttaaagaaggtgacatgattggaacagtcagcacatgaagtagcaaattggcaatattattttgcaattgccgtatttttaatcacgtacggatttattatttctgagaaattgaatcgtgctgtaatcgcactattcggtgctgctattatgattatttttggagttgtagatttacatactgctttcacatcacatattcaatgggaaacgattacccttttaattgggatgatgattctcgtacatattacgagtcaatcaggcgtctttgaatttgtggccattaaagcggcaaaagcagctggtggaaaaccgattcgcattttattattactatccctattaactgctgtcggatcagcatttttggacaatgtaacgactgttttattaatcgttcctgttacattatccattacacgtattttaaaagtaaatcctgtgccttatttgatttcagaagtgctgttttcaaatataggcggaacagcaacattaatcggtgatccacctaatattatgattggatcagcaaacaagcatttagactttaacgcctttttacttaacttagctccaatcgtaattattatttctatcgtgacacttggcattatttacttcatgtatcgtaacaaactaaaaacaacacctgaacaaatcgaaaaactaatggcattaaacgaaaaagattacattaaagatcaaagcctccttttaaaatctatttcgattttaggactaactattttaggcttcgtacttcattcgattattcatgtagacgctgctgttatcgcgatgacaggcgctacacttcttatgttaatcggcgtgaaagaacatgatattgaagatgtatttgcccatgttgaatgggtaaccattttcttcttcgccggattatttgttctcgttggcgggttaattgatatcggacttatctcttcacttgcaagagaagtaatcgacgtaacaaacggtgacatcggattcgcagctatacttattttatgggtatctggcatcgcatctgcgacaatcgacaacatcccatttgtcgcaacgatgattcctcttattcaagacttagctacaggactcggactatctgtcgattctccgcaaatcgaagtactatggtgggcgttatctcttggagcttgcttaggaggaaatggaacactaatcggtgcatctgcaaacgtagtcgttgctggtattgcaaaacgtgaaggacatggcttctcttatatggacttcttaaaaattggtttaccattaactattgttgcactcttgttatcacatgcttatatatatttacgttatttaatgtaaaagttgtattgcatgaaattatatcgtcaaatacaaaaggtttgcagcatccgtgctgcaaaccttttttcatcaccaaaatataccgataattgctaaaccacctaaaatcataccaccaatttgtccgacaattgttggtgataattgaacaccttttctcacttcaacaactggtctttcgtgccttagttgctgcacttcactttgaagttggtgcacacttccgtgtaactctttaataagttcttttaattcggcgacctcttcatttactggttttgccttttctaaattcattttacatgactccttataaattcaatcaacacactgtaaattttcgccaattaccattatatctcctgcatactacatatataatttcgaatgtactttctaaccttgcagctctatccattcatcccgcaatatccccataatcatacggtcaaaacacttcccatctctttgaaccgcttctctcatacagccttccatttgaaaacccatctttttatacaatgcaatggcaggtttattatacgaaataacatcgagaccgatgcggtgtaaattcaattcatagaaagcatactttagaataagatgtattgcttctttcccatatcctcttcctctatcattcgcatctcctataccaatggctaataaacctgttttgttattccactctataccatgaatcgccacaaaaccaattaagcgatcttcttgaactgtccttaccatgaaagaaacactattcgatctccgtccttttaataactcatcacttgctatttcttgtaacgattgcggaaacgctacatctgtatcgacatttcttaaatactcactatcctcttgccacataaccattactacagcatctgattctctaatagcggataattttacaattttattttgaaaaagattcatcgtcatttcaaactcccccttttttaataacggggatacttattttagcctatttatccccttgttccataaactgctttataaacgggatacttacaataagcgctgacattggcacatctcctctacacgaaattaacttcattgtataatttttcgtttattctaacaataataaaaagccctccaaatttagagggcctttcctaatagcaaaactatattatttcgtaaacattttctctgcttcatccattgccattttgttacctaaagcagaatagtcaagccatggttggtcattgataatatatacatgcttgcctttaacagcttttaagtctttccaaattggtgtttcttgaagttgtttaaatgcagcttttgctttatcatctctatttacaacaacgaaaatcgcatctgcatcaaagtcaggtaatacttcttgtgaaatgacttcgaaaggacgttttccattgattttctctacaccatttgcaggttgtaatcctaagtcttggaataaaattggtcccatcggtcttttcgtactaaatacacgtaattcttttgcagtaacgcgaattgccattactttttcgttattacctagctctttatctattaaaccttttactcgttttgattgctcttcgtaatcttgaatatattgatccgcttctttctcacggtttacaagtttaccaacttgttttaaatggtctctccatgtaccttcatctaaattgaaagtatgcgtttttgcaattttttcgtatttcgctacatctttaccagcatatttttcatcaacataaatgtcagttggctttaattgaagtaacgcttccatattcggatctgttacaacaccaagcttcttcgtatctttcaacttctctttagcgtgcggtaagaaatcttttaaatctccaccaataacagaacctactggtgtaattcctaatgcaagtaaatcattcgttaaatgaatagacatagaggcgatttttgggtcattactttttttcgtttttttcgttgcctcttcattagatttcgtttgaccacatgctgctagtactaaaatacacatgatgctaaataaaatagtaagtttctttttcatatgttctcctctttgaagtatttattttgtttttgtaagtaaataaagaaaatacggcgctcctaaagctgccactactacaccagctggaatagagtttggctcaaatatagaacgacctatcgtatctgctagcactaaaataatcattccgataatgccagctagtggaaggaaatgttgatacgtagtacctactaactttcttgcaatatgcggagcaactaaaccaataaaaccaatccctcctgccatcgatacactcgcgcaagataatccaaccgctgtagctaaaaggagtaaccgttctttttgaacagaaacaccaagtcccgctgccacactatcaccgagtgacaatgcatttaacgtttcagattttagccatgcatacggagttagtatgaaaatccaaggtaataatgcaaggacatgaatccaatcccttccccacacgttaccaactaaccatctagaagcgaatgtatatgtctcatcatttaacttgagagagaaaaataacgaaattgcactaaagccagctgaaaccgcaataccaacgagaataagtctaatgggaagtaaaccttttgatcgatcactcgcaagtaaaataataagaaatgcagctaatactcctccgccaaatgtaaataacggtattaatatcgatgcattctcattaatagaatgaaagaaagtaacgaatataattagcccgaaagatgcacctgaatgcagtccaagaataccaggatcggccaacgcattccttgataacccttgcaaaatcgcaccggaaatcccaaggccaataccagctaacattgtgattataattcttggcatacgataatcgtacagcacggttgcactctcaaaatcaccatgaccgaaaagcgtttgaattactttgagcggtgcaatgctaagtgtccccgtatttaagctaagcaaaatgacagcgatactaatacaaccaaatattgtagttacagtaacggctctcgttttatctgtgtttaaaatcttcttcacttacaactccctcccaactttacgtgctatatagaggaagaacggaactccaacaagagccaccataattcctatcgccagttctttaggagggtttactgttcttgcccctaggtcagctaaaactaataacatagcacctaataatgctgacataggaataatgagtcgataattcacaccaactaattttctagcaatatgcgggataactagtcctacaaatccaatagagccaacagctgaaacagatacacctgcaagaatgactactataatcatccctagtattctcgttcggttcgtttttactcctaaattcgtagcgacatcatcccccattgatatgagtgaaatagaccgccctaaaattgtcgcaaaaacaattgttatgagaataataggaactaaaaatttcaagtgttcccacttaacccctgcaacaccaccagcgtaccaaaaagctaaatcttgacttaagtcataataaatcgcgacacctgaacttaacgaatgtaaaagcgcagccataactgccccagcgatcgttaatctcatcggtgttaatccgcctgatgtggccgatccgataataaaaatgagtactgtacttaagaccgctccaataaaggagacaatcattaaataggaatacggcatatgcggaaaaaaggcaaaactaagtgctactacaaacatcgcacctgcatttatgccaagtacacctgcatcagctaaaggatttcgtgttactccttgcataacagccccagcgaccgcaaaagccgctcctacaactgctgcgccaattacccttgggagccttaattcgtaaatgatttgatgctgcgttaatttcggattgtaatcaaaaaccgctgtccacaccgtttgcaaatgaatatcctttgcaccaaatgcgacggccaaaaatatagatccaattaaacatataattgttaagctcataaaacatatgaacttaatatgtatccagcggttattgccagcatgtatagtagacttatgtaacatgtttcatttcatcctttatatgcagttgttttttataattatttttaatttataatcattactgataataattatcattttcatttagatattatatcctcactttttttaaatagcaaactatttttttacttcgttaaatattaaaatacttattacaattcccttccaaaacttacaaatacacgcaaaatagaatactagcttatttttaaaagtgtagtatacttaatcattattttgagttttcaaataaaaacatccaaggtgatgcaatgttatatataaaacaactactctattttacttatgaacaagcattatcctgcttattcccagtcgttattttcttaacactagccctttcaaaaatcgtttcgatcccagggttataccgctacgatttcatactcatcgtatgccttcttatgcagtgggttatgtacaagactggccttgagacgaaagacgaattaaaagtaattactgtcttccacctcatcggccttttactagaaatatataaagttcatttcggttcatggagttatccggaagaggcatattcaaaggtttttggagttccactttacagcggctttatgtatgcaagtgttgccagttacatatgccaagcgtggagaagattgcatttacaaatgcatcattggccgaaagctatttttgtaatacctctaggagcactgatttacttcaattttttcacacatcattttctatacgattttagatggttcttaacgttacttctattcatcgttttctttcgaacatttgtggaattttcattacgaggcgttacatataaaatgccgctcgttctctccttttttcttatcggattctttatttggattgcagaaaacatcgcaacatttttcggtgcatggcaatatccaaaccaacgggaagcttggaatctcgttcacttaagtaaaatcagctcatggtttttactcgttgttattagcattatgattgtcacgcagctcaaacatttgaagcaatcaaaaagataatgctaattatgtaaaaacagttagcccatcaatcattagagagtgatgggcttttttttagtaatattttttaaaccaaccttatcaaaggagttataatttacaagagtataagcagttgcacattatgaactactactagcagaagatgttgctgcagatgaagcggcaatcgttgccatcatagcagcctgttgtgcttgtatgaggacttctatcattgtttgtaaacctgtgttggtagttttactttcctcacctttctgacttacgaacagttgaatagcaataagaatatttgtatctgtatgccaacggaacaatttatccccctgcaatttttcaataaatgctctaatagaatgaatctctttttctccatcctcgagtaacgctagtaacccgatagctgggtaatgcatctgttttacttttaccttttcttgctttaacaaattccatatatttgtgcattttgcgactaacagttcttccctgacatccttctttagtgaaagaatatgactcaaaaattgaagatcattccctttatgcaaaccagctgtcgctagtttctgataaaggcgttccactcggtccataagtgtgtctacattctctgattgtcctgctaataaaaccgcgagcggataatcatttgtacttgtaagaaagaggtgatcctttttcatgcgtttatatacttgcattgagcgttgaatgtgcgcgccatgctgttcattttcttctgttaaaagtacagctgctgcgagataagtaaatatactgcggctaaacccaccagtgaccaattgttcatataaatctaaaaactcccgaaaagctttctggtaatctgtaaagtgaatatctaatgttgctgccactacaaaacgatgataagactttaagtatgaaaacatccctacctgattcttaatataactactaatttctaaaaaacgtccgcgatcaaacagtttatcactacctgcatacatagcagcaatcatcattcctgttcgagaatcgctcgttttccattttagttctccctttaactgtacatatgtatgtttatattgctccaacttttgctctaatgtaatcatagtattcacccctatttctagttcttctctatcattatacttatattccatatttaggaatactacaattaataatcacaccataaaaattataaaatcctcttatccttcttcatcagcatcacgatgatactccctaatccttcaagaagttaaacaaaaaaggtagataataatttatctaccttttttgtttatatcatttaacattacacctgtattgcttgttatatgcaattaagactaaagagctttaataatacgttccatcgccttcatttgtccaatatgatcagcttcatgataaagcatcataccgtaaagctcaccaactgtttccaatcctagaaatggctctggcagtttattttcaaatgcttctgctggaatttctttaatacgttttgcttgttcttttaattggaccgttaacacttctaatgatggtccttctgttgtccatttagatggtcttgatccatatccaaacatacctggatattcagttggtaattgtttgaattcttttccaaacatgaaaacttctgctgccgttaatacatgaccgatatgccaacgaattgtattgttaaaaccctctggctgcgtatccacagttttatcatctagcgtctccataaatttaagtaatgccccgcgcgttatttcaaattgttttagaccaattattctattcattttatcgttctccttcttcatgtacattttattatgaactaagaatgttcaattcattaaagtttcactttgtttaatctatcagaaacaatgaagaaatacatctaatatgcttagtaaaaataataaaaaggttcacctctcgtacatatagaattacttattacacaaatagtttagtaaataaaagaggagtgttaatttcatgttacatgttttaaaacagcaatataatcttattagctctacaagagaaactctattttcgtttttggaagaaatcccagtagaaaaattacatagcacagttcctaatttcgggagcggtagcattataaagactcatattcatgtagccgattgctaccgatactggcttggatcattcgcatttaaacaaaagcgagtagacttttcatttgctagcgattacgaaattgagcatgcagatgtgaaaaaagttcgcgctagatttaagttagtagatgagactgtacaacgttttttagatgaatacaatgaccgttggctcgaaaatattgcaaatgaagtaaagtggcaaaaagggccttggagtacaactccgctatggcttttaactcatacggaaacccatgagtttcatcataaaggacaaattgtatcaatggccaggcaccttggatatactcctcctgatacagaccttagttaatacattcatgttcatttcaaagcggaatgggcagcaagaataatagtatgatcaaaaaactcgttgatacattttgttgtgtataaaacttttattatttgttttaggtataccataccattataaaattcatgtaacatcgaattaaggttcatattttttatgtaactcattgaagaaagtttaagtatttatacattcaattactaactaaaggagaaaattataatgagattagagagcgaaagaatttatttaaggcctctttgccagctagatgctcctattatattagaaagtacaatggatgatgaaataagatatatgactggaactaagtccactttttcattggagcaaattacgaaacatatagatcatataaataatgattcaagtcgctatgatttcgctatttgtttacaaagtactgacgagatgattggagagttgtcgcttttagatatcgatgaggagaacgaaagagcaggattcagaatatcaatgctttccatagcattaacaggacaaggttatggaactgaagctattaaaatcgttttaagatttgtttttgaacaactatcattaaatcgtttacagttagaagtatttagccataatttacgcggaattaaagcttatgaaaaagttggttttgcaaaagaaggaaccttacgtcaatctttattttataacgatacatactcagatgaaattattatggccatacttaaaagtgattatatagagagacctttgtaaatgaatgtacttaatctattaaacaattttaaagaaccttaccacaataaaatgcagtaaggctctttcatttttatatcaaataacagctcttaaaacatgtataatcgtatcaataccaaatagtctccgcataattatatgcatcactattcggaattgcatgtttcccctgcgcttgtgcttttcttggatctaaatcatataccattggcgtatagcatgatgtttgccctttatttacaacaccatttcctccagcacttccgcaagtgtatgcctttccatctgtttttctaacaatccttgcatcagcttcattattataagtaacttttgcccacgctgttttacacgtcgtgctaaattttaattccacataagaatttgaatcaatccacttcttttctttcgttactgctgattgatcacaactattgtaatacggacttttcccatcatacgaatggtcttctgcaaatgctttatcattattggtcgtactaaacacactagttacgacgagcaatgccagacaaagacatgcgcttacctttttaataagtttcacaggattccactcctttattaataacgtccagttttcccgtaaccattattaatcgtcactgcttcggcatcagctgtataaccaaaatcagcagtcaaatcaaacaccattcctgtataagtgctcgtttgccccgttttaattgctccattaccactattagaatctactgatttttggaatacaccatttttatatttattaataacagcgtaagcatatactcctccagaaacagaaggtgctggttgatctaaaacaagcttagaccatgccgcatgacatgtattactgtaacgtaaatacactgttcctacttttttactaccttcataaactgctgtagactttgcattaaatccatctgcatcacatgttgtacttcccccgtatactttcgttgttgctggattttttccgtcataatagctactcagatcagtagctgcaaatgtactttcttgaaaactaaataatacccctacactcgctacacttaacacacatactttcattaactttttaaacatttttaattccccctcaaaatgattatgtatactaaacacaacctatactgctgtgtcagccctccttccatgcttcctagaggcatcttacaaaaacgaattaacgttgtaaattcccttatgattattggaatatacgaagaactttacttatccttgtaagaaaaaaagttgagaaatacacattttatagcatcctttatttaaaacataaaagaaccgatacttgttatattcaagcatcagttctttatacaaaattgccattttttcttttatataaaataaatatttctccacttaatttgttgtaaaaaactccctcgttacatcaataaattgctgcagtggtgctgtcatccatttatctttatgccaagcaatttgtgtataaattggaggtattgtttcgtttaacattaactcctttaacgtcccttcccgtatatctttttctactactatcgctggtaaaacggctatacctaaatctgcaataacacattgtttaattgcttccacactaacaaactcaattttatttgctggatatagatcttccccgcgaaatagctcttcaaataaagttctatatgagcagcctaattctgttaataaaagtgtttcactctctaaatcttttatagaaacagtagtctgttcaagtaaaatatgccctggagcagctactacttttaattcttctttcataagtggttccacatgtaaaacatcttctgttttacattcgtccaaaataaatgcaagatctacttttccctccatcaattgttccttcgcatctttattggaatgtgctggtttaaatataagctttattttggggaattgtattttaaacctctttaatatagaaggcaatctgtatgtacattgactttcttgtgcaccaattattaacgtacctgctatttcctcatcatctttcacggccgtctttgcttcgttactaagtgcgattatcttgtctgcatatagttgaaactttcttcctgcttcagttaagaaaagacgtttccctaatctctcaaatagtggtgtaccgagctcagcctctaacgttttaatttgtgctgtaacgctcgattgagcaaagtttaatttcttcgcagtttgtgtaaagttcaaagtatctgctgctactttaaatgtaattaattgttttatctccatttatcatccctctttttcaatcgatatttccgattgatttcatcgaaataatcctctttgtctattgatatttatattgtatgataaagagcatcgacaaacaataaaatggaggtattccatatgaaagcactttgtttcgaaacattcggagatgctgatgtacttcaatataaagaaatccctgatccaatcattaatccaaatgaaattcttatcctcacgaaagcaatcggtctaaatttcgcagatatttatagacgccgtggtgattatcacctcgctggtaaccctccttatatattaggttatgaaggcgctggtatcgttgaagaagtaggtgctaacgttactactatcaatcctggagaccgtattgcatttgctgacgttccattcgcaaatgcagaattagttgccgttccagcagaaaaagcaatcccgcttccagattcaatttcttttgaaacagccgcttctatcttattgcaaggtctaacggcacattatttaacgaaagatagctatcaaataaaacaaggtgatacagctttagtccatgctgcggctggtggcgttggtcaacttcttattcaaatgattaaactactaggcggaaaagtaatcggtcttacgtcatcaaccgaaaaaaccaaagtagccacgttagttggggctgatcacgtatttttatatactgaaaaatggcattcaaaagtacttgaaataacaaatggtactggagtaaatgttgtatatgaatcagtaggctctacactagagaaaagttttaacgctactaaaatcggtggtactgtcgtattttacggaatggccggtggtaatcctgcgcccattgatccacgtatgcttatggatacttcgaaaactttaactggcggagacctttggaacgtacttactacttttgaagaacgtaagcagcgctctactcaattatttgattggatcgctactggaaaattgaacattgcaagtcctactacattctctttacaagacggtgcccgtgcacatgaattattagagagcagaaaaagtactgggaagattttattgatcccataattcataaaatgaaaagaaagctagattaaaattttgtgaagacctatagtgaaaaaaattgataaatgaaaggacataacatattttatataactaatatgttatgtccttacttcttcaaataacgatcccatgtatcactcgaataatttttgagctcttttctcaattaaaactccctttaattgcatatgttcttttatttgtatattgctagaaaattatcatttttatttatgaataaggctacgtaccgatttaagctaaaaactagattttgatcctataacaacagtggcatctaattcctcatctctagtcactttcgtggtaagcccagcaccagcaaagatttcaaaagtctgagttgcctgcatttcactcgtctctattaaaagatgccctcccgatgcgagccagagaaatgcttcttttgctactcttcgctgaatgtcgagtccatcctctcctccgtctagcgccattttcggttcatgtagacgggcctcctgtggaagcagctttattgtctcggtaggaacataaggtacgtttgcaactagggtattcacatggcctttaagtgcgtgaggcaaagctttatacaagtcaccttcaaaaacatggccaccgaaatttgttacgttgcggctagcacatcgtactgcgacaggatcaatgtcaacagaatacaattcaattcgtcctaaagctgccgccagagctacacccacagcacctgaaccgcaacatagatcaacgacgatatcaccaaagcataacagagcttctgcttggcgaacaagaaactcggtacgttgacgaggtacgaaaacacctcggtccacttctatccgcaacccacaaaattctgcgtatccaacaacatattcaagtggcaaaccattggctcgcatttccaccattctcttgagctcctctggagttcgggctgctgaaataagtaaccgggtctcttcttctgcgaaaacacaacccgcgctctgaagtctgttaattatacatttttccgttttattgtccaaaaaggaattacattcttttcctatttatctcaccactttttcttatttataaccctgtattcgctaaaaattggatgtatcctttttaacaaagtggtcctattcaaaaaaatacgcccttattcaattaaatgacccgattgttgaacaaagaaacgttctacacaatagaaagtttcattataatatcccaatataaccttataaatgatgcactaaaaaataaaaaggaagctagattttactaacttccttttcttatatctatttaagatagtattatatttccacactttctttcccttttgcaacataactcatatctccaaccgactccactgtgtatgttccatcttgatatacaatcttcgtcacgctagcattttccactccaagttttgttttgctactgtctaacatttctattaaggtagtaatcaaaagcccatgaacgacaactaagacgttaccgccaccattttcagcagcttcttcactaattttatctatctctgtttttatacgagtagaaaacaattcccaatcttccgcctgttttgtcggatctgctactctaataagattaatcacttcttgaatagaaagcttcaagagttcttctggtgatgcaacgcctgcagcttttccaaccacatcccacatattctcaagtttttcaccttcaaaaataccgaaatttaattctcgcaaatcttttctttgctcaagttttaattttgattgctcactatattttaatactaaattagcagtttcaattgcgcggccgctatcactactatacgcattcataaaatgaatatcttttaatcctgttcctaaatttgtggcaacttcaacacctctttctactaaaggagaatctgcccaaccttgcgcgcgatgattcgtatttaatattgttttaccgtgtcttgtaacatataacgtcactacattctcattgctatgtgtttctcgcttattcatttcattctctccctttacgtttctatatcaattttaccacctcaattattcattgagcaaaatatacgtcagtagatccgcttaataaaaaaagctatctttctgtatatccatacaaaaagatagcatcttttatgattacatttcttaaccggtactcctattcagcaaaagcactcgaatattgtacaattccttctacacctcgaagagaattttctgttaattccattatcataaatacctcttcaggcacttcaaacggtgcttttacattccactcacttgctttcttaaaaccaaatttcgggtagtactctggatgtcctaatactacaactgatccgtatccaagttgtttcgctttttctaaagcagccgtaatcagttttccaccaattcctttcttctgatggcccctagcaactgaaactggtgcaagtgctaacgattctacagaagttccatcttgttctatcgcaattttagataacataatgtgaccgactatttcctcatctactgcaacgattgataactctgaaataaatgcgtcacactctctaatacgttttacaagttcatgttcctttttatcactaaactcttcatgtaaaaatgcttcttttacaacttcttctgtttttctataatcatttttttgttcttgtctaatcgttaccattttaacttatcctctattctttcttatttctttttgaattttacgaagtgcttttttcgatccgcgctcaatatcgtgttgcatttttctctctttataatcgacaaatagtgtatttaaatcgtatccctctggatataactccttcgctgctacctctaaagtaatacgttttacatttacttcaacgaattcaccgttataatatacaacgacgttataaaaattatctttttccttatagatgataccaaaatcatcataatctaataaattcacacgatcgccgattttgtactcataatgaaattctcttttttcttgtacaaatttcggttttctaattttactttcattcactttttctaaagcgtactctttatttcccatgtactctttcgctcttttcagcacatgttcttttacgctcattttattcgcaatccaaagtgcattactttctcctgattttccgataactaatttataaagcggctctagcgtttcactattaaactgcatcgctgcattcataaagtcatcgtgcatttctgagaatcgtttaatttctccgtaatgcgtactcgcaacggtaatacatcccgtaaggtacaactcttctaaaatagatattgcaagtgctgcaccttcatttggttctgtcccgctccctatttcatcaaataatagcaacgtattattatttgacatcctcataatctcagaaagatttttcatatgagacgaaaatgtacttagtgcattttcaatactttgattatcaccaatatctacgaatacattttcgaaaatagcaatttctgtacctttatctcctgcaatatgaagacctgacattgtagctaatgttaacaatccaatcgtttttaacacaattgtctttccgcccgcattcggccctgtaataattaaactacgatactcttgaccaattttaaaatttaagggtacaacttgccctgttaaaagcggatgcttacaattcactaaatgaatgtagccatgatcatttaacttcggttctattccatcaatcgatttactaaacttcgcttttgcaaataccatatcatactgactaattagctccatattaatctttatactataaatgttttctaacaccattcctgataaagtcgctaaaatttgatattcttcaaccgcttcttctgctttcaaacccgctagttccgcattcaatttcgtaaccgtatgcggttctataaatacagtagaaccttttgccgaggcttcaataatacttccagcaacttggtttttataggaagatttaattggaatcgtgtaacggtcatcctttttactaataaagaattcctgaatgaatttcttatttgcactactatttaaaaacttcgttaaacgttcttttattttcccatctacagaatcgatattatttcgaattcgttttaactctttacttgcagctgcatcaatactatttcctttaattgaaaagttaatttcctcttcaatacttttatattcagtcattgaatttgcataagaagctaatactggtgcaaaaaattctttatctaacataaactttttaatctttctacatccgcgtaaaaagtctgaaacactgactaattcttctggatctaaaatcatccctttttctaatttttgaattgtactagcaatattagaaatgccgaagaaaggaacatgcccttctgcatctaatatagctcgtgcttctgtcgtttcattcaaccgatttctcactacttttatactcgtactcggctctaatttgtttaataattccttacctaatccacttacacaataagatttcactatatcctttaattcgttatattgtagcttttcaaaagtcatcgtattcattttatttctcctcactatgattgatttttatcataaatgaagatacctactcattagattccaatgagtcatatataaaattccataattatacaataaaaatatatacaaaaaagctgcggggataccgcagcttttacatttacaaggcatttgtaataacatatgaggaaatatgccataaaaaatagatggcagtcccttattacacgctttataaagtattgtaggtatcttcataggttttgaaataaatgcatgacaaaattaggggtatgatgtacataaaaataccctggtcttatccgatttatttcattaaatttttcctatttaatacctaccgcactcacaaaaagcacctctcattaatttatattatagtcattgaaatctaatttattgaaatcatcatactatatgttacgtgagaagtaaaggtgtcatacttttataactatacagaatgtaaaaaggaataggaaaacttatatttcagtctacctcttctttttcatcaccaaattactgctgaacatatatggaaactgatcctccacttacttgaaactgcccccatccgtccttattaattgttacagtattcgtttgattacccgtaatatcgtaccatacttcccctgcgttattctttccaacatccatccactttgcccctcctggtccatcagagattaatgttgctaaaccagaattagcatgtacactatcaccttctcttgtccagccaatcacatctggatgatcaaaataatcacgctgcgtaccatatgcaaagttttttcgtgccgtcaaaatcggatcaattttgtcctttaacgctggaatttcatagttactatttccttttgtaccatagtaatcaccatagaaaacagaaggatacccctctgcacgcgttaaaataaatgcatatgccagcggcttgaaccaagggctcactacagattccaatgactgaccaggctgtgaatcatgattttcaactagagtaaccgcaagtgtaggatgattcgcaactaccgttccttttaaaatatttctcatatcataatttccatttcctgttgaagcataatgaaaattataatgaagtggtgcatcgaacacagattgattataattaaccttcgctaaataattatttaaagtctggatatcattttgccaatattcagctactgtaaacatttctttccctgtttgctgtctaacgtgatttacccaatcgcgcaaatattcatgatcaatatgtttaacagcatctaaacgaaaaccatctaaatttaattcattcgcataccacgttccccattttttcatttcattcgcaacatctggatgatcaaaatcaagatccgcatacatcaaataatcataattcccattctcgctagacacttcccagtcccatgctttacctatgcccctaaatttataaattcggtttaatttccttccttcatcccaatccgttccgtcaaaatgataccatttccatttgaaattagaataagaatctccacgccctggaaagttaaatcccgtccacgcactaatttcataatcacctgatacttcaatattccgattgctcgggtctacctcaactgctgtgacagtttctgtataatcagccccacctttatgattcataactacatcaccgtatacatcgatgtttttcttatgtaaagcgtcaattgcagatttcaattgtgctttcgtcccatacttcgtccgcactgttcccttttgattgaattcccccagatcatataaatcatatgctccatatcctacgtcattttgcgtagttcctttatatgcaggtggtatccaaacagatgtaattccttttttcgctaaattttcagcatcagtacgcaaacgattccaatgattcccatcattcggagcataccactcaaaatactgcattaacgttccattgttaactgtgtctgcatatgctttactcccgtcatatatactaggtaaaaacataacaactgacaatccgactattgttattcttttaaacatctgtacaccatccccttccaagaaagcgtttgcatagtttatcagaattattataatattcgtcccaccgttagtaaagtagcaatctctcactctctcatattatttttaatctaatttcaaatattcaacgtagttttaatttcacatcctattcaagattgtttacaatttacctataaaagcataacggagggatttcgatgacagactttcaaaaacaatttttcgcacgattacatatagaagaaaaagacacagtttcatttgaagatttatctaacattatgtacgcaatggcacaaactgtcccttttgaaaacttaaatattctcgaaaagaattttaaagaaatatcaaaagaaaatttgaaagagaaaattttagtaaataaccgtggcggtctttgttatgaactcaaccctactatgtattacttcctgaaagattctggattcgatgttcatctcgtttcaggaacagtttataacgctgcaaactccatatgggctgttgattctggccatatcgcaaccgttttaacacatcataatgaactttatttaattgaagtaggattcggatcatacttacctcttgcccctgtccctttctcaggtgaagtcattcactctattacaggagattatcgtattcgtaaagaaatgaccgaaaagggaaactacattttagagatgcggaaaaacaatgagttcttggatcaatcttctgctgatgattggacgttaggctatgcattttatatagaagaagtggatgaagaaaaagcaaatacagcacaaaaaattatcgttgaacatgaaggatcaccctttaataaagtacctcttattgtaaaactaactgaagatgggcatgcctctttaacgaaagatagccttacagtagcaaaaaatggtaaaaaaacgaaagaaaccgttacagacatgcaatatacaaaccttttacattcaaaattcgaaattacactataagtaagtaagccttgttatttcagcagggcttttcaattttcagcagggattttttgcaatttgttgtatttcatagttatatagaaatataactacatgtttagaaaggaaatgattatgacagaacttaaagatcgattacaagtagctgatatagaaaaatgggatttaacagacatttaccatacaattgaagattgggaaagtgattttcataaaattgaagtattaacgaaggaattacacgagtttaatggaaatattcacgatggcaatagtttattagcttatttaacgaagagtgaagaagtttctagcataatatctttaatgttcgcttatgcacgattacaatctgaccttgatacacgcgatactgacgcgcaatctcttgtcgataaagtatcacaattacacgtgaaagtaagtgcagcgaaatctttcttttcccccttcttacttagcatagacgaaaacacattacattcttacatagaagaaacagaaggcttacaatattataaagaagacttatttgaattataccgttataaaaaacacgtattaaataaggaccaagaagaaattttatcacaaatgggtgaagctctttcttctccacagcacacatttggtatgttaaataatgcagatatattatttggtgaagtgacgactgacgatggagaaaaagtgaacttaacacgcggaatgtatgcaaagttaatagaagatacgaatcgtgaaaagcgtaaagaagcttataaagcatattacaaaccatatgttcagttaaagaattccatcgcatctactttatccgctgctattaaaaataatgttactgtttcgaaattaagaaactatccatcagcgctagagaaatcattatttggcgatatggttccgaaagaagtatatgaaaacctaattgatacaacgaaaaaaaacattcaaacattacatacatacaatgaaattcgaaaagaaaaattaaacgtagatgaactaagacaatacgacttaggcgtcgatttagtagaaggtgcaaaacaagacatcccatatagtgaagcatttgacattatgattgcatcactagctcctttaggagaagaatatattgagacattaaaaagttttaaagataaaagatatatagacgtaagagaaacaccagggaaacgttctggtgcttataactttggtgtatacggcgttcatcctttcattcttttaaatcatcacgatgatttaaacagcctgttcactcttactcatgaatgcggtcacggtatgcatacgcactattcacatggataccaaccaagaatttctgcacattattctatctttgtcgcagaagtcgcttctacagtaaatgaagtgttattaattcactatttattaaaagaagcaaaagatacgaacgtgcgtaaccatttagttaaccattttattgagaaatttaaaggtactttctttacacaaattatgtttgcagaatttgaaaaaatcacacatgaaatggctgaacaaggtaaaccattacatgcacaagtcttcagtgaaatttatgaaaagctatttaaagaatataacggtgattcacttgtatttgatgaagaagtaaaatacggatgggctagaatccctcatttctatcgcccgttttacgtatacaaatatgcaactggattcgcatctgccattcaaatcgctgataaactattaagccgtgatccggatgctcagaaaaattatattgaattccttaaaggcggaagttcagactacccattaaacttattgaaaaaagctggcgtcgatttaacaacgccagaaccgattgaaagtgcattaaaacaattcactcaacttgttgaggagttttcaacattataaaaagcatgcagagtatatgctctgcatgctttttatttgaattactctattctatatgctgctgcgtcacacaatgaatcataccaccgtatgcatacaattcgttaacatatataccgacaattcttctccctggaaattgaccttcaatgatttgaagccctaatttatcatgttcatcaccgtatataggtaccaatacaacttcattaccaatgtaaaaatttaagtacgatcctttacaatctgcttcttttaccacttttcttgttactggtactggaatgagctgaaatggctttccatctatatttttcgcttgccgcaattcttgataatgcttttcgtacgcctccaaaaggtatggctctccttcatcgaaaggatcatattcatacagtatcgtattttcatttacaaaccgtgccgcgccatcaatatgataatccgtatcttcatcataattatcttctccgcgtataccagttatccatataaaatttgttactcctaaatatttcgttaactccatttcaatttctttctgacttagtgtgggatttctattttcatttataatagacgttttcgccgccattaaggtcccgtttccgtttatctcaattcccccaccctctagacagacactagattcaacttttggaatacgatacatttcacttattttattcggaatattagcgtctttttcgtacggatatttatttccccaaccattaaatatccagtgcgttaggcagcgattcccttccttatccgttacaaaaattggtccgttatctcgtatccaaatatcatcagtttcttgaattaagaaatcaattttatccatattcacgttagctacaattaacttcgattggacatgtattttctcttcttcatcacatacaacaatatggacattttctccatagtgaagctcctttgccatcgatatccaaatatcatctaacttagctctgtaaccttcacctctatgtgctttatcatgtggccattggagccatgtaccttcatgtttctcccattccgcaggcatataaaacaaactattttctatatttctcatacgtgttcaccccttatatgaatgtacgtacagtctatactttgacatcgtgttaaggtcaacaggaatatcttcatttacttgtagcaactttataaggtgattctttatttctcctttttattatgataaattgctttcatacatagaataaggattgacataatgttaatatcaatccttattctcattctattttcataactaaaaaacaaatttgtgtcacatactcttctgctaaacaatcacattcaggtccctttatataaacctcatatggcgaattaattatcacatacccatttctttcaatccattcttctaacgctatataagcgtaacctatatagtcgtaacttccataatgcatagtagtaacgatatgatgtggacttagttgtttcatttcatactcttgcgctacgtcatcatcattcccctgcataaccggaattcttaactcaatatcactgttactcggaatatattcttcatcataaaagactgcagatggagaaccgactatttgaaagttatttttttgtacctcttcatataagtcataaaaataatcatccatatcatctatatctatttttactctttgagtaattaacgttacttcgttactcattcccattaatatatcgtaacttctatggcgtgcaatatttagactactattcaccattaccatttcattcatttctgaaataacctgtaaattttgcttcacttcctgagacaactcgataatttgtgattgtatatgttgaacaaacgaatcttgatccgatgactgcaaaacaattttaatttttggaagaggaaatttatactcccttagcttttttattttcaatgctacttccagctgctcttgttcataatacctatacccattaaccggattcacatatgccggttttaatatctcctctttgtcataatgtcttaacatccgcgtactcattttacaaatccgagaaaactcagcgatggtatacatatcaatactccttgaatatattttcttttcattacttatttattaaaaccaatcaaaaatcttcttcattgaaaaattttcattctgatttttcaatcttctcattttcgaaggtaacaaatgacttggacaataccacgttaaacaattcatcgcgcctcccattgttgatatttctcctacatgaatttgaataacttgtttctccgtatactgttgaatatatcgtaaaacttcctcatctttagctagtccaaacttaggaacataaagagcatcacatgattctaacatatttatatacaacccttttgccgatgctatctcttgatcatattgtcctttctctgtatatgatgaaggaacaactataaattcagcttttggcatttgttctttaataatctcttgaacactatatctaaattcatgatcccctaaaaaatcactaataaacattgtatgttcatcaataaatttaaccattccgtctgcgtgtgctagtacatccccttcctcagcaggaataataataactcggctcacatctaaatcccattctaactgctcaataatttcctcttctgtccaatcatcgttatcatcaaatatgcgttctgttaatattacagtatcttttttattccaaataagattaccaccatctaatattaatggggattttacatattcaaagtcattctttttcaaccatttattaaattgttgatctaaatatcgcccttgatcatttggcaaataatttggtcgatatttaaatttaactagatgatttgtgacaaccggtgcaacatctcttagccaaatatcatcatactcaaaacagctcgtatgaaagtcttgttcttcaacagataaagatataagttgatccgcaattgatttcttttcatttaaacattcattaaagtaaatcaagtcttcataaaatggttgataatattcatttgattcgtctgttattgcagtaaaaataatgccattatgtttttgttccatattatttacctcgctttttaatagtagttacataactgattttacaaagtcaactattcctaattttatgtcttttgtcgttataactcatgcaacatgtacattttatgaatggattatagcatggagaaatattatatatttatataaaaaatataaggctgacgttaagccttaaattgactcttgacaagttttttaaataccatattttaaaacaacaataaatgattaaatgataactcgattcattaccatccaatttcagttcttgtataaactgaatgacttctttcataagaaacacacttagaacaacccctaagcaaattaaagctacatttaaaatgtactgtaaaacgatagggaaatacgaaaaaactattttaaaattctttaacacaaacatttttctcctttaccatataaaacgaaaagcgaatatacactataatttatttatcattacattaaaattttatcattataaataataaggaacgacaaaataggtaataagattccacctattttgtctatatagcagaacaacgaaattacaatcaattacttcaatgcaatgggttgttgttgtgtcacacaatgaatcataccgccgtttttatacaactctctcacatcaataccgactactttatgacctgggtataacttctgaatcgtatcgtttgcgattttatcattcggatcattataattaggcactaatacaactgtatttccgatataataattgatatatgaccctttataatcgagagtttttccattttctaaagcaaccttttctttactaagcggcaagtattcatacttatatttctgtcctgaagcattttttgcatctaacaatgtatccatatctttattagataaaccccattcggctaggtcatcttctttcatcgttacaatggtagatttattatggaatttagcaaatccatcaatatgaaagtccgtaatatctaaattaggtactccgtctaaccaaataaagtttgataccccaaggtcacttatatatttttcaatttccttttctgataaatcaggatttctatttttattcgtcaccgcacttcgagttaataaagcagtcccattgctgtctaattcaattgcgccgccttcaaggacaaattttccccaatcaactctttcaattcctgattgtttactaacatttttacgtatttgagcatcatttttatacggtgttttcttcccccaaccattaaatgctggatctaatattttgagatttttattgctgtcataaataaaaattggtccactgtcccttgcccatacatcatcagtaggcgcgataaagaaatcaatcttctccatatttaacccttcatctgttaaaaggttattgattctttctttttcttcctggtcatatgcaacaatgtggactttctcaccctcagttaaagcacttgccatcttaacccaaataggttcaacttccttcttatactcttcaccatatgtgtattcatgtggccattgcagccatgtaccttcatgtttatctttttcatctggcatcgtatatttcccagcatttttctgtacctctacttttttcccttctttccctttaacattttcattgttcccctcaaaagagcatccactaataatcgttgtagataatgtagctattaaacaaaactttattgcttttttcattttttcaacctcctgttcttgtctccaataatgtaaagcttcacatagtgtgaagctcaagcttttttatcaatgtaaaaattaccaattgttctttgcattacttaacatttaactacctatttagatttattcaaatgccaatcgcctttcttacctatttatcccgctatttatgggcagtaagacccccacctcaaaattcagcggaagcaaataatttaagtggggccctgttgcccgtaaaagcccgattgatgagggcttctactcagtggtggatgaacaaagcctctccactgattaaagtttcactttattcagtaagtaaaactttacaaaataaaaaaatcggtattgataattccatatcaataccgattttttataattattttccttctattaaatcattcgccattttcctaaattcttgattaaatgcatcattcataccattttggacgttagaaaataatatgacaaacgttcgtttatcccagttaaaattattaaaagtgttccagccagctaatacaccgtggttatgataataatctgggtaaatatagaaactaaatccatattttcttgcaggtgatgcagaaaacatatctgatacactttgtttagaaagtagtttaccatccataatagcttcatctaactttttcatatcttcaacagtcgtatacatttcaccacaaccatacagccagttcatttttaagcgaggtgtggctattaacttattatcttttttcgtatacccttctgctaagaaaatatcttctgggagtgttgcgcccattccagattcatgcatttcaacaggattcaaaatattttctttcacatattcagcaagtggtttatttgatattttttctacaatatatgcaagcaccatataattataatctgtatatttccatcctgtccctgctggaaattgtaacgtttgtgccccaatccacgttactaattttaaccgtgatgctgcgtcaacactaccttgtccctgttctggtaatccagacgtatgtgttaacaagtttcgtaacgtaatgtttttatctgctggaaacgatgggatatatttatttacattgtcttcaatgttcaacttccctttttcttttagttgcataatagatattgcaacaactgttttcgtaatagagccaatgcgatatttcgttcttggcgttgttagtacttgatctttcacattcgcataaccgtagccttttcgtaaaatgacatgacctttacttgctacaagaacactcccattaaatcctttatcttttaagtactgatctagttttccagctgcaatttcataacgctttttctcattcgcatcaatttcctgcttaacatctttttgcttactatttacattagaaaatgcctttgcatcatatttttttcctttatttgcatgtattagtgtaacaacacttccacaaaaaacagcaaaaataaagaaaatgattaaccatttctttaacatactaggagccctcttttatctagtttcacttaacgtacatccattctattttatatcttttaattatcaagtatattataatattatttaatattcactctgttaaaactagattcctttttctcactttcaattttgactactctctattgtatttctttcttgcaaaatttccaacatacaatcggatgcattacaatataatttcaaattcttttgtaacatttgttacatactaaaaagaatggagatgtatatgaaaaacaccgataaacgcaatcgtttagatgataagatgtttcattatcggataacaaaaaataacatgttattaattgaatattacggaaaacagattatggcattaaaaggaaatgatgctgaaaaatttttaaataaaataaatcatgcaaataacgataaagaaaaacagctaattatggctaaaattacaggtaatttcaaaagaggtaatgaacgaaattgaaaacgaatctcatttacattttgattatacaacaaataaaaaaagaaatgtcgctcattcaacatttctttagactttcttcataaaaaatttacattgctaacattccttcattttctatacttcctatataagctaaccgctgaaatagttagtaatacaactatacataaccacgcatacgtatatcccttcttatctacaatataaccaaataaagcaggcgcagcaataatggcaatttgatttaatgtaagtgcaaaactcactgtcatccctaccgattcttcacttgctgattccgcaacttcagttataaaaagactaaaccatccaattgaaaagaaccctaacaatgcacttacaccatacaatacattcgttattgtatgtatgctcattactaatattagaatgaagaaaatagaaatacaaacagttataaataagagggtacgccgatttcccttataaaacaaatcactagtagctgctaatataaccctaccaaccattccagaaaagaacataacggaaaatacttttccagctaaaattggcgtgattgattgttccaatactaaaaattttataaagtgtgcaactaacaccatttgcaatgaaatcatacaaatgccagttatataaattgcatacaattcttttttacacatcacttcttttaactgcatccaaaaagaaagtttactacgttcttgtttaactttctcttgaatatatggttccttataaaatataaaaaataaaaaccctccaattatacaaatacatgcaatgctatttaccgcataggccatattatattttattgtaagaaacgggatcaatactcccgctaatgtaccaccaatcggtataccggcttgtctaatccccatcgctaacccgcgattttcttttgagaaccacttcattatcaccttacttcctcctggctgcgaaacactataaaacgttcctactaataaaagtacaaagagtaacccattaaatccattgaccatattagtcagtaaaaacgaacttcctagtaaaaatgaacttatcgaaattaacaacttttcattgtattgatcaagtagccgcccgacaaaaagcatacaaaatagcggtcctatatttacaacacttactaacaatccaatctccgtattcgtaagtgcatattcttctttccaaaataaagcaaacgctccaacaccatacgttataagtgtcgctgttgtttgagcaaccgtcgcaaaaattaacataacccacttataagtactattcaccctttcttccattaacacaataatccctccatccccttccattgtatgaaagttctgatatcatataaaataaagatttatcatgtaatccatcaaaaaaaatgatgccttttctggagggatgatacttggatataaaagatttaactgtattttacgaagttgcgaaagaaaaaaacatatctcatgcagctaaaaatttaaactatgtacagtctggcgtaacaatgcgtatgaaacaactagaaaacgaattaggtgtgcctttattttatcgaaacggaaaaggtgtaactttaacttccaacggtgagattttattaacatacgccaaacaaattatccacttaatggatcaatctgttaaagcagttcaaagtaatgggatcgaaccaagaggcactttaaaaattggatgtacagaatctacaaccgctgtaagacttccatctatattaatggcctattatgagaaatacccaaaagtcgaattaattttagaatcaaatacgacggaacaattaattaggcttgtactagaacgaaaactggacggagcgtttatagctggctctactcagcatgccgaacttcatacaaatatatttcgtgaagaagaattagttctcattagcaaaaagcctttatcttcctttaaagacataggagacatgaatttacttgcatttagtcacgggtgctattatagaaatttattagaagattggcttcaagaagaaggaatttcacctaagcgagtatttgagtttggaacaattgaagcgatactcgcatgtgtaaaatcaggtatgggcatagcaattatgatgaagtctattttaaatggtcataaacatgacatattattcaatcctttaccaaatagcttccaaaaagttcctactacttttattactagaaaagatatatatcactctgctgcattacaaaaatttatggagatgactcacaatccgtgaaaagaaaatacgtggtatgaaacgaaaaacaaacactatgataaagcgaattgaggaacatacaaaaatgttcccttctactttctataacgatgaatactggaatatgcctttaccagtttctcaagcttttatcgattcttgtaaaacgcctagaaaagtaaaacgattatgtattcaaaccttattaaatcaagcaaatcatttaataaatataaaacctagggatacacatacatatcgagttgttgttttgatttctataaataatttatgggattcgcaaatcattatatttaaaaatgaggactactttcataatttctttaatagagatagtgaatttcaaaaatggattcttctttcaaatgaaattgatttttgggagacatgggaaatttcagtttgtcattccttcaaaacgcttcactttcaagaaattatttatgatgcagatgaatgctatgaaaaagagattacgtttatcggggagttaaattaaaaagggtatacctaaaacactggtataccctttttcacttatttttcctttaatacactatgtaatcgatccggataatttgtaaacattcctgtagcaccccatttgattaacagtctcatatcgggtttctcattaattgtataagggtgaattaacagtccatttttcctagccattttcatatatgactcatcaataattagttctccgttatcattacgtaagtttggtccaataccagctgcatactttttaatttcttgaaaatcatcatttgttacacttttcggttcatgtgtaataccagaccattcaacaatttcattgttttcatttggataataccaaagcaattgaactaacggaatattttcattcatactatgaatctttttcaaactatctttactaaatgattgaatcataacacggctagaagacatgttttggcctactaaattatatttttgtaacaacgccaacaaattctcttccattcctggatacacatctggtgattttgtttcaatataatacttcatacttcttccatacttttggaagatttcttcaagagttggaaccttttgcccaacatactcttgcttagccttttctggatacgctttattaaaccatgatccagcatctaaactctttatttcgcttaacgttttatctcgtacttcgcctgttccatttgtagtgcgatcaactgctgtatcatgcattgcaattaattggccatcctttgttaattgaatatctaactctaaataatccgctttcatttttttcactagatcataagaagcaaaagtatgctcaggtgcatgtccacttgctccgcgatgtgcaatatttaaaaacttattcgtattccattcatgctttccttctgctttcgcatgaacagctcccccagcaaagatgcttcctgtcataaagaaaataactaaaacgctaataatctttctcatccttcaaacccttcctacgttgcaaatttcaacaagctaatgagatttacacgaaatagaagacacactttcattatttttataaacctatattaaaattccaatcttacaaatgttttctatattattaatatagaaaactagtattatcctatttaatttctatagccctccttttcacatgtaactccctattttgtacggttcattcaataaaaaaagccataaattatttagaatacactcctgtatccctaaataaatttatggcttttctcaaatatctccggcctctattaacttgtcgaatttaatcatatcaaacctattgaaatttgtgaatatttttttcagtacagtgaagtacataaaacaatatttctgtagttacttaaaaatcacataataaatttctcattacctcttccaatactatatctggatttactaccgttttttccgaacgccatccgataaagccatctggtctaattaatacagcacctccattctctataccatataatttgctaaaaatatcttctggaacaataaagtctccacttaagccaacacgatacccttttagatgtattcctaatttagctgaaacagcatgtgctgcctcagcccaagaactattttctactcctgtaagtaatacaaaactgttaccgaataagtctaatgtagaaactttcttcccctcatacgttccccataaatgtggcgctcgcgttccaggtcttccgttcaactctatgctatccattctatgcggagtgactgaatcatctataatcgcctctgaacaatactgatatccaactgtaacagctaaaccatccatattattcaaactgccttcctctctattcgcagcacgaaacagtaaactacttgcataagctgtcgttaattttgcaacagagtgtctctcctcatgatatgtttctaacaattttggttttgccttcccttttataacagccgctaatttccaagctagattgtgcgcatcttgtattcctgtatttgaaccaaatcctcctgttggcggcataatatgtgcagaatcgccaactaaaaaggttcgatttccttgaaatttcaccgctgtactttcggctgcttcccacggtaaaacacttaatatttttgattcaacatttgtacttccaattgctatttgaataatttgtttacaacgttctatagtgaagtcctctagcccctctccttttaatggatcgtaggctacatgataaatccatttttttacgttatcaaccgggataagtgcaccaagaacctccggatgaagtaccatcgaaaaaccgaatgcatctccttgtataaactcacttaaatcagcttcaaaataaatattcatataatagccaccaatggttccacgaccctcagttttaatccctaactgctcacgtattttacttttcgctccatccgctgcaattacatagtcacaatgtatgacactttctttttctgtttcacgatttcgaatcgttgcttttaccccgttttcattttgttcaaatgaaactaattcatgataaaaagatagttgctcgcctaatattttcgcttcttgtaacatcatctcttctaaaataatttgataacacgcagtttgttttgatggactaatcttttctattttttgaagtaactcttcatcgtttccgtattgcgtcgctctcatttgttccaattcttctttattcgcctcagctattgtatgaaccgctattcttcctctgcagttctctaatgctttacctgccaatttaattctttgttccaagcctaattctcgaaataactccattgtacgtaaagtaagaccgcctgctttcggatgaatggcagtagacggatgcctttcaataagtaagtactcaatattatgttttgcaagaaataacgcagacgctaacccagataatccccctccaacaattaaaactggtacatcattcgatttcatatatttaccctccacatcattgttctgagctcagtgacataaatataatcaaaaaaaacattaaaatatagacttatatttcattttgaattatcatatagatagattacgccccaaaattccttttaccttttcatacatctataatccacctgaattgtgtctgtatgaaagtgtaaaacaaaagaatgtaatttacgttgaaccatgttctatcgtaaaaatcaaaaataatacaaacattataagcggccgtaaccttatggattatacaaggttacgaccgcttattttattgttacatcattttttgtttttaaaacttcatctattgtgttatgtaatccttccaatcccttttctatctccctataattttcaacaataaaaaattcattcgtctcgattttctttctcaatattgcacctcatgcaacaatcatgtagcattaccgtatcgaagtaatggttcatcatcttaaacctttcgactaattttttggaggtaaagtgattgaaatgaataaacaagaacaattaaatgttataaaaaaagattttattgattctcaaaaagtattattggcaattggcgatgaaacacgtcaagctattttgttagttctcatggaaacggaatgtcaaaccggattacgtgtaggagaaattacgaaacaaacacacctttctcggccagcggtatcacatcacctaaggattttacgagaagccggtattattttaatgcgaaaagaaggtacaaaaaacttttattatattgatatacgtacaaaattaggtgtattaaaaaatcttgtgttagatattgagaaactattgcacaacttttattaaaatttggaggtataagaaatgaaagcaatgataattgataagtacggaaaagttccaatgcgcatggcagaggtacctactcctgaaataaatcaacatgaagtgctcgcagaaattcatgcagctagtattaacccaattgactttaaaatacgtgatggaaaagtaaagatgttactgaaatatgaaatgcctctaatccttggtaatgacttttccggtgtcatcgtgaaggttggatcgcaagtaactcgttttaaagtcggcgatgcaatatatgcacgtccaagaaaaaataagatcggtactttcgcggaatatatagccattcatgaggatgatatagctttaaaaccaaaaaatttaagttttgaggaagcggcgtcgattccactcgttggcttaacatcctatcaagcactacatgatattatgcatttacaaaaaggacaaaaaatattaattcacgctgggtctggtggtgttggtactttcgcaattcagttagcaaaaataatgggcgctaccgttacaacaactgctagtgaagctggttctgatttagtaaagtctcttggcgcagatcaaattattaattacaaaacagaaaaatttgaagaaatactcaaaaattatgatgcagtatttgatacaatcggcggaacaacacttgaaaaatcattcaatattataaaaagcggaggaaacattgtttccgtttcaggtatgccgaatgctcgcttcggtaaagaatttggttcaggcttctttaaaactctcttattttcattagccagcaaaaaacttactgcacttgaaaaaaagcataatgctcaatattcatttttatttatgaagccaagcggggatcaattacgtactattgcaaactatattgaagccggaaaaatcaaaccggtaatcgatcgagttttcccttttgaagatgctcaaaaagcaatggaatattcagagtctggaagagcaaaaggaaaaataattgcaaaaattaaataataataaaaacctccattttcttaaaatggaggttttaaatttgctgttaaatagacatagtgcaatgaagtccttacaatagattgcaaggggaaatattatattatacttttagttaactttacaaagaatacatacgtacaaatacataacttaaaatacaaaaaggaggagatacaatgactaaaaataatgaaacaggttggaatttagataatagttatacgactttaccacaatcattttatacagaaatcccccctactcccgtaagttcaccggagttagttaaactaaaccattcattagcgatatctcttggcttgacccctgaagaactgaaaaaggaagctgaaattgctattttcgctggtaatgcactcccagaaggagctcatccattagctcaagcatatgctggccatcaattcggacattttaatatgttaggcgacggtcgtgctcttttaattggcgaacaaattactccttcaggtaagcgtttcgatattcaactgaaaggttctggccctactccctattcacgccgaggagatggtcgtgctgcactcggtccgatgctacgtgaatatattattagcgaagcaatgtatgcactcgatattccaactacccgcagtttagcagttgtcacaaccggtgaaccaacatatcgtgaaacaaagttacctggagcaattttaactagagtagctagtagccatatacgcgtcggtacatttcaatatgctgcagctcgtggttcaatagaggacctgaaatcactagctgactatacgataaaaaggcattacccagaaattgaatcccatgaaaaccgatatactgcattactacaagcaatcattaaaagacaagctagtcttatcgcaaaatggcaacttgttggatttattcacggtgtaatgaacactgacaatataacgatcagtggcgaaacaattgattacggtccttgtgcatttatggacaattacgaccaaggaaccgtatttagctctattgacacacaaggtcgttatgcatatggaaatcaaccatatatggccgcatgggatctcgcacgactagcagaatctttaataccgattctgcacgaagatgatgaagaagcactaaaaatcgctcaagacgaaatttcgaaatttagcgtacagtatgaaaacaattggttccttggaatgaaaaagaaattaggactatttagcaacgaagaacaagatcaatcacttattgagcaacttttaaaaatgatggagaaatataaagcagattacactaatacattccgttcattaactcttgatacgttagaaaatatccctctattcgatagtcctgaatttaaagaatggtacaaactgtggcaatctcgattagaaaaacaagaagaatcgaaagaaaacgcctacgagatgatgaaaaataataacccatcaatcatcccgaggaaccaccgtgtagaagaagcactagaagcagctgttacaaatgacgactatagcgtaatggagaaacttcttgaagctttatcaaatccttatgcgtattctacagatcaagaagaatactgcattccgcctgcaccgacgaatcgcccttatcgtactttttgtgggacttgattaaaaatttgtttttattttaacccaaaatttattaagttaactattaatcacaaacttaaaagttgctttcaatattgaaagcaacacatttagtatccacccttaaacaagtcacaaattataatttgtgacttgtttaattacccacgttcaatagaaggtttgttttgcaggcatcgttgtatcttcagagacagcatatggattttcattaggttttataattataaacgttccaccatatccactgtgagctaatttattgcaaagaccttctaccataaaaccccataactccagctgctattcccattatagataatccaagttttttctttattttaatgcttctttttcaaatattctcttttttatttcataactcataaaaaaatacttttctgctttttctatattacctactttatgaaactctaatgccagactttcagtatattcgtgaatatactccgataaattttttctttcaaagtaagaaaaaccttcaagaataattttttctattttttctacctctaaatgctgacaaaatccctttagaattaaaaagtgatatctatattcatcattttttaattcctcacaaaccttcaatccactttcaattaattccttcgctttttctatttcacctaatttataatattctcttgcctctaaaaagattgccttataatgagtaggcatttttttagaaacctcagataagtgtctaattgctaaaactgaaagattttgactcgcatacaataaacctaaattatgtctgattcttaatactaacatttctgcatcatttttttgtaaaatgtttattgctgacgcaatatattcctcacctttatcatgctgctttaattccgaaaaagataatcctaatatattttcgcacagcgctatgttcacttcataccctgcttgtttaacaaagatatctcttgcctttgaagcgtattcaatagctgaatatgcgtaatgcaagtggtattttaatatagcaactctataattaaactctgcatattcaatttcatctgaaatatgctctaataacccttcagctttttcaaaatagttgctagcttcactataattagtaagaattgtataatgaatggctttgaataaataataataataattagaatattcatcatttggtttaggcaatgcatctattttatcaaaagcttttttcaaattacctaaaccatctattagcactttatatcgaaattctaacagataatagtgaaatgaaacctttatatctgattcgataatataaagctttttatcgatctcttcttttaatttttttgcctcacttatacgttgagctctaatatctcgataccaatcattcagcatcttattaattaattcattgccagtgatttgtatattcatcaaatccactctccttcttttaattatcataaaaataacataattcgattatttatatctatctatctatatatatatttctcaacaattgaacgaaattcattcactgaattttgttcaatattttaatagacccgctgtaaatatgaatactttttcttataacctctgaatatgagtatccttaaaatccgtctcatatttcaatccatatccaaacattcgatccattccaatatgtgctgtccatattaagccaatcattataacggtatctatcttaaaatagacacctattagaacaattaatatggatatgatatatgtgtgacatacattatatattttcgcaccaacgtgattattaatcccatatgctaacattgatagatccggcgctaaaaggaatacaaaaaatataatccaactaaactcatatatcgaatacatataaatcgtggctaaaaatacaaccattccttcaaaatgtacaatacgtttttgcattatttatcattcctatttttctatatttattgatacattttcatcgctgaaagtattctttgtattttttgaccagatggttgctaatattggccctgcaatgttatgccatactgccgctaatacacttgggagtgcagcaaccggtccaaaatgtgctgtcgccagcgcaacacctaaacctgaattttgcattcctacttctattgaaatagcccttcttgtcccttcgtctagtccaagtacgaacgcagttatatatccgagcaaaaaaccgaaagcattatggagcatcaccgcaataaagataagaagtcctgaagaagtaatgctacttacatttgctgaaacaactgcagaaacaattatgataattgctacaactgatattaaaggaataacagtcattcctttattaacgatatgagggaaaaactttttcactactagtcctaaaataataggcacaataatgacttgtacgatagaaagaaacatggacatagcatttactggcatccattgccctgcaagtaatagtagaatgagcggtgtagcaattggtgctagtaacgttgatactgaagtcattgcaatagacaacgctaagttcccttttgctaaataaaccataacatttgatgcagtgccacccggtactgaaccgagcaacactaacccagctgctaattccgctggcagattcataacgtaggctagtacgtatgcgacaagtggcataataataaactgagcacatacaccgataataactggtaatggttttgtagctatgattttgaaatcaacagccttcaatgttaatcccatcccaaacatgacaaccccaagtaaaatcgttatgtaactagttaatccgagaaatggcgcgggaatgaaatatgcaatagctgcaatacaaataacccaaaatgcaaaatactttccagctatattacttatcgcttctagtactttcatccactcagcccctattttttaattgaaacacctttttcggattcaaaatattttgcggatcaagaactttctttattttctccattacaaataatgccgccccatgttcttcttcttgatactttcgtttcccgattccaacgccatgttctcctgtacacgttcctcctcgtttaagagcatactgaacgatactttcatttatttcgtctgccttcttcacttcctccttatcatttgtgtcaatcattaagagtacatggaaattcccatccccaacatgaccgagaataccgccaataagccctactttatgtaatacctctttcgcatgttgaatcgctccagctaattccgaaattggtacacatacgtctgtactcattagctttttaccaggataactatgcacgtaagagtacgctaagttatgtcttgcatcccacagcttatttctcgctgctgtttccgtctcaaacgcaatttctatacatttatgatcaagaacgatttctttcgtaaattcaatatcttgctttaaccctgcttcattgccgtgaaactctaaaaacagtgtcggttcttctctgtaacttgtttcattgtaataatttacttgtttcatagataattcatcaacgagttcaattctcgcgattggaatacctgcttgtaatatgttaattacagcttctactgcatcatttatagttggaaacgatgccctcgcagccataacatgttctggtataccgtatacttttaaagttaactccgtgaaacatccaagtgttccttctgagcctacgaaaataccatttaaatgataacctgatgatgacttcgccgctaaattcccggtatgtattactcctccatcagcaagaacgacttctaaatctcgaacttgatcacgcattaccccatactttaccgctgtcgttccgctcgcatttgtagcagccattcctcctaacgttgcatcagctcctgggtctacactaaaaaataatccatactttttcaattctttattaagctgagagcgcgtcacccctggctgtactctcacaagaaaatccttttctcttatttcaagtattttgttcataagagaaaagtccattgtaattcctttttcgtaaggaattacatgtccctctaaactggaccctactccaaatggaacgacagctgttccgtgctgaatcgctattttcattatcgcgctaacttcttcggtcgtttttggaaaaacaactacatcaggtaaactactactatggtaagattcatctttactatgtaactctcgtactgtcatatttattactactcgatcttcaggaagtatgccttttaattcatttactacatgttcaattgttatttccataatcaactctcctttttaattttaaaacaagtataccatctttatacaaaataattagaaaaataagattattaaacctgaacatacaaaaaagaacctgcagcacacgctacaagttctttttcactacattttaaacgatttctttattaacaacataaaccaaattaaagtaactgccatcaacgaatgagaaaatcctacaatataagttaaccctttaaagtcagctccatttaactgaagaagccctctcgctgctagcgaacctaacattaatgttaatgcaatattatgtaaaacaaaccacttattaaacccttgcacttcatgaaacgcgaatacttttgctaatcctaaagcaattaaaaagaagaaaaagccaagtacaagtgtatgcgtatgcaaaagatttaacaaagtagaccctaaaatccctttatacttaccatactccctagcgaaaatccctgataataaaccgataatcaaatacgtaaacgatgcattatataatttcttcattatgtacctccttgagtagaatgtatagtgtgtcatatttagtaataatgatagttatatagtaaaaactcctaatcacctaggagtcattgtataagcatctcactctttacaatcaatcctaattataagatatctctctatacaaaacaaacgaactttatgtgaacaaacacccccattaaaatatgttgcacttttgttttacacaatccatactaattgttataactttttaaaggtggtgtaattattgatagttcttgaaactgaacgtcttaatcttcgctggtttgatataaaagacgctccttttattcttgagttagtaaacgatcctgcatggattcagtttatcggtgacaaaggagttagtaacttagaagatgcaaaaaattatattgtaaacggtcccatcgatatgtataacaaacttggattcggcctttacttagtagaacgaaaaaaagatctcactccacttggtatgtgtggccttattaaaagagattcattagaagacgttgatatcgggtttgcctttttagagacattccgttcaaaaggatatggctacgagtcagcttctgcgataatcgaatacggtgtacaaaagctcggcatgaaacgaattgtagcaattacttctgtagataacatcgcctcaggaaagcttttagaaaaagtaggattacgatttgagaaaatcatttcagattcaggagaagatttaaaattatttgggtataacgcatagtaaagaaggtcgccgtgaatggcgaccttctttactattttactaatcttgtcataatacttttagttccattatagttttgcagtaattcttatgattatcactattcctttcatatcacatttttggaaattcatagaagtgaaactttcacacccgagtaaattatattaatatattaaacaaaggaaatgagaataaatggaacaaccgctatttttattagttcttcaattcattgcattcatattaatcatttgtatcgtatatggaatgttatacaataccgtattaaatttaaatatgcctaaatggactgcacatatggtagctacggtattttcccttggtattgcctatcaagcttttataaattttatttgaaaaacttttgtagcaattacttctattgttgatgcagtaaagcttttagaaaaagcaggattgcaatttgagagggttatttcaagatcagaaaacgtaaccattttttataaagtctttccagcgcaaaatagtgaagaagttagttccgctaaaaatgtgtttgcataacaaggaatgaatttaattgatcctgcaaaaattttatttgaattctggttctattgtttggaatcgttctagggtaccatttgtgtggactttaaaaattttcatttgcgcaccaaaatgttgagttaagtaaaatgtatcactagttattaaatttccaatcttccaatcaggttgatatgtactttccatggaactttctaaatccccaatcattattaaattgatatataatgaagatgaattactcaacattttcgttaaagatagtctatcaacctctaactacctaatgaactccagtaaacacatcttcagtcattttaagaggtacaaaaggcaccctttcgggtgatttttgtataaaaattctatttttttatattcgataccaaccacgaacctttttaaaataatagtatcattatgtctcctttttagagattatttttaattaccttgaatttttcgcaccagaaccggaaaattcctgactactcgaaatatcaactattaagtgctaatattcaataacgcgtactgaaaatgattaaacatttttataaaccagtggaacatttaagaaatcaatttttctcttatcgaaatttaattagcttacagcaatacagtggtcatatatttttaagaataacggaagaatatatagaaattgctacagaaatgtgaagtttaattaatttaggaggaacaaatttgtttaatcagcttgtaaaagttataccgaatttatttacgattggaaatttattgtgcggtgttttctcaatcaccttgaatatgagtgaatatttaggagcagcctccattctcattttcttttcagctgttttagattttcttgatggaagaattgcgagaaaattaaaagtgaacagtgagtttggcatagaattggattccttagctgatattgttagtttcggcgtcgctcctgcgcttttatttcatacgatagcaacaccttctattttaacttctttggcatttatcctattcccaacaatgggtgctttaagattagctaaatttagtattaaaccaactattggatattttaagggattacctattccagctgcaggattatcattggctggtatggcattgttttcatatagtaatgcatggattactttaatcctcgccctcttaatggtaagtcccattaggtttaaaaaattttaatgaaggtcacgcccaacgccattaaggagcattttaaatggatttaacgcgtcaataagtataaaaaagcgggacaataatattaaattaggtgcccttcgaaaaattaaaaccttgtatttatggctattgggttaatccatcgatatgttattctgaaacgtcaatccacttttaacaggagctccctttatcaagagagctcctgttcttatttcttcttcttttctgtcggttggctttgtttagcaaaattagatgaatcatcaaaattcggttgctttttaccagcattattacttctaccttttcccatatgtaatgcacctcccctcccccttactattcccaataaaaaaattctcttgcatccaagagaattttaaattgggttcttattgatactacctaagtacttccaacactgccatttcataaaagatggatccaatgttaaattatttaatgctaaaacaaatattacattttcatatttaactggataatcaattaataatcctaatgtatttcctgaagctgcaacaattatgattcccttttctaacacgtcatctataacttcttttaattattcttacctagcatataatatttttctacacattgagattgcttgttgtataaggaagcttttcttttttccatgcaagaaatcctccctttaaattcactacttcctttataccagctctttgtaaaatactagctgctatagcggaacgtaatccggttcgacattgcaaaactattggaaaatctttcggtatataatctagttgttcaaatagattacctaaagtgatatgtattgcatcatgaaggtgtccttcctcccactcttttttactacgcacatcgataaccttaacgcttccaccttttatatgcggatataattcaatcgatgttttttctttgtaactttcaaatctatcaagtctttgtattacttttaagggtgcaaaagcaataatattatctaacccaatagattcaaattctctaataactgcctctactttaaccttttcctcatctagaattattaaagtttcttttttataatctaataaccatccacaccaagttgtgaaagaattgttataaggtatgttaattgacttctcgatatgacctgcagcaaaactctctacatcccttatatcaactatttgatgaacgctcttcaaaatttcttgaagttcttctactgtattaatagcagtactttttctcttcttacgaattggcggaccatacttatttaaattcttcattaatgaaaaatactttggaggctctggctgtcccgtcaataaagtcgatataaaatcactttcttcattacactgaaatgcccaattgaacatcttttcataacctaatgtagaagttggaattgctcctaatgcttttccacatgcgcttcccgcaccatgtgatggccatatttgcaaataatcaggaagtatttttattttttgtatagaattaaataattgtttcgctcctatttttgcagtatccttaataccgactgcagtttctaataaatccggccttcctatatctcctacaaatataaaatcacctgtgaatatccctatcggcttatcattcgtataattattttgacttgtatcagttattaaaaaagaaatactttcaggcgtatgccctggggtgtgaattacattaaattttatatgacctactttaaactccgtgccctctctaaccaatttgtatcgaccttcgttaagatattgatatttccaatcacaatccccttcatcagatacatataaatttgcatggtaaagagtagaaagttctctagacccagaaagaaaatcagcatgaatatgtgtctcagccgcagcaattacttccatcccctctttcttagcaaattctatatattgttctatatagcgactaggatcaataacgattgctacgccttctttctgacaaccgactaaataggaagcatgtgctaatttttcatcataaaaatattttaaaagcatatctattccctccaattagttatttcaaattgattttcaatttttgtaaccattttttatcttctcctatagaatccctttcaacattaaattccaatacatatatggcaacatatatcttttaagtaaaaacatactatacctttctttcgcttgattaaatggaaacgtttcttgtggctcatgttcatagttaaattcagcgagtataagacttttatatcctgtaacaatcggacatgatgtatatccatcatatttagcctgtaaatctcttccgctaagtacgtccataatattttgttttaagacgggtatttgttttcgaattgctgctccagttttagaggtaggtaaattggtacaatctccaagtccaaaaatatttttatattgcacatgctgcaaagtataagggcttatatctacccatccctgatgatcacttatctcactctctttaataaaattaggtggccccattggtggaacaacatgtatcatactatatggtacggtttctctttttagtgtttgcgtatcttcaaaaattgcctctctcttttcggcgataatttccactaaatttttattataattcgttataatttgctttctttctagtacttgttctaaagtatttgcatatcgtggaacctgaaatatgttattgtttgcagaataaaacattacttcacttctgtttcttacaccactattacaaaaatactcctctgctaagtacataattttttgtggagcaccaccgcatttaataggagtattagggtgggtaaaaagcgcatttcctcctttgaatttttcgatttctctccaagtagaatcaacatatgtataagaataattgctacataccccattagtgccaatagactcttttaaacctttaatactgtcccaatttatttgtataccagctgctacaataagaatttcatattcaagtaacagtccgtcatctaaaagtatcttattttcagatggaaataacttaacaacacttttagggatccacgttgccccttttggaataagcgattcctgattacgcatcgtactttcctttgaaacaattcctccccccactaaactccatagtggctgaaggtaatgtttttttgatggatcaataattgctatactttctttaaataggggtacatttcgtaataaatgtgcagtagaagatagtcctgctgtcccagcaccaattacaataattttataactatctctggtcttcattatcctcttcctatctaaaattgatttttaaattaactaattagtagccattttttcatcgtagtaacattattataagttaaaaacaccatagttttatctgatttaaatgaaaattttgttaattttaccatcaacattactatatgcgtaaatcccttatgttacttccatattttagttttaatattaaaactttatatttttatataaaataaaaataatatattaaaatacttttcatgaatccggataagtaatgttaaaaaacaacatctaacatcttagatgttacaataaacaaattcacatacttcacaaatatgaaaagtattaaatatcacttaagtttcgttaccttttcttctgtatatattgataaaaaattgtgaaattttatcgcattatgcaagacatttaatatcaaatatattactttcactatgaactaaatggtttataggaaatttatagataaataaagtgctaaattgactcttatgcagtaattatcgtttaatttatcgaaaaattgaaaaaatatgtgtagatagatatcatttaaaatacatatataattaattttaattttccgacacgttttttcacatagttcttaaactagttttttgcgtgcattatgaaaaaaattgtaccgtgtcaatcttaaaaaattatatatcataactttaagagaggaaggaaaactatgaagatgaaacgaaaaatcattatgacaacagcacttgcagctacgttagctacaggtgcactacctactacctcggtgtttgctgcagaaaaggaggctcctattcaaccaaaagaggcacaattaagtattcaaccttttgcacaaaacaatttggaaacagccgttcaagctgccttaaatggtccagaagtcaaaaaaatcaaagtatttgaacatgaatttaatgtaaaagaaatagaagtagtaaatctaggtgcaggaaaaaaatatgttaaggggcaaatctctcaccatttaagttttcgtccagatgatcaattttattatgagtttacagtacaagatggaaaggtactagataaacctgtatttaatattgatagaggtggttggacaccatttgctgctccacttttatcaattcttgctgcgtataatggaattccagttaatccaaatgatttaaatgcacttggtcagcagattggtaaagttatagatggaagctgggaacatgcagctcaatcaattgcaactgtagttagtctaagttttaatgagtagaatttttcaatttttattagcagtgtagagatccgctttttgtaatcagccttgttataagagattctaaaacagctattaataaatttttaccactcaatcacattatcttgatttgtttaccaccttatcattcattatatgtcacaaaatagaagtcttttttaggacttctgttttgtttgtattcaatacgataaacagttgttttttggaggctatacttcgagttttcaagaatccgtttgactattagggacaatttataataaaaaattattaaagtctcaaataacttactcccccctattgttaattatttttaaatacaaaaatttattatcttaagaatgaaaaacaataaatatagtaaaaaatcatctaacaattgtttaaaggtcaggagagaaaaaatgaacaaaataaaaatgagaaatttctttaaaattagcatccttacttgtattacactagcaagtttaaatagaccatctactattttagctgatagtcatccaggttactcctatgaatccaatatagggtatcaaaatccatcgtggatgtcgaaaatagaagattcaacaaaaataagtgaaatatctattccagggactcacggtacgatggctttacatggagcgagttttcttgatgaaaatttgacaagaaatcaaactatgagtttatcccaacaattaaattccggaattcgatatgtagatatgcgtgttaaacgtgtaaaagattcttttgcaatgtatcatggcgttgtaaatcaaaaagctgtgtttgaagatgtgttaaaagagaccattcaatttttaaaagatcatccaacagaaacaatattaatgcgcttaaaagaagaaactactcctgaaagtggatctctatcatttgaggagatatttttaaaatataaaaacgttaatgcttcatatttttgggatcctaattccgtaccaacttcagatagaaataaccctactttaggagatacccgcgggaaaattgtaatcttacaaaactttacatccgctcaattgtacgggattgattacgaaggtttgaatatacaagataaatttgaaattggaagcggaccagacgaaatatatacaaaatggattgcgataaaaaaccatctacaaaatacaaatactaattttaataatgaaaaaatttatctcaaccattttagtggtacgggaggcgcagccgcatttttaaataatgtatatccttggtttgttgcaagcggaaaagagagcagaaatactgacagtagtcctaaattgattcaaacgaattccactaatgcgtggagtgattttcctcgcgatagaaacggacaagtatactatggggggatgaatacacttgggaccgaactcttacaacaaggcgcaattaaacattctggtatcatcgcagctgattttcccggtccaggtttaattgatagtatcattaaattaaatggtatacattcaaatgaaaaagaaatattaatttcacaaatatcatctgaatctagtcctttatcagggcaacaaaatcgatccagccaaaactttaaaattgatagtttacctgtaggtaccaaagaattaaaatgggttattgagccttcagaaaaagattatccttctactatttctttcaatgtaatgattgatgtttccctaggaatagattctactcgttggaaaaatattttacatgaatctaggactgaagcttacacaaatactaaatattatattgcaagtccaattggtgccactagcaaattcacagtgaaaatatatgctattacaaattagaaaataaagaatccaaatggaattcctttttgatggaataccattcggattcttttttgattttaattcgttaacattaggatgatgattaaatttattaatataccatttaaaccattagataattcatgcttggaacgacccttactttttaaagagcaatccaaaattgttaactacctttttcagcttatcacttattcaaaactggcttccaaagcgataaagcaaaaatccaatttgagtcgccattcccttgatgattttgaaccgcttcgtacactttcccctcatgtactactctatcacctttagtatatgcttttcttgcatcccatttttcatatgcgggatcctctaactttgttgttacattcaaaacatcacttctactagattcatttccagctaaatcaaccgccgtcactacatatttatacgatgtattagccttcaaatctttatccataaaagatgtattagccgccgtcccaattttattcataaccccagcgctttctctatatacaatataatggtcaacacctacattatcttctgacggactccacattaaattaacagttgtcgctgttgtacccatactatgtaatccttttggctgagttggagcctctatatctgggattgtatgtgttgtcttaaccttcagtttttcactttcttttgatatgtttccagcagagtctaatgcctttattgtataagtatattccgtatctgcttttaattttttatcaataaaagttgtacctgataccgtatcaattacttctccattacgtaacacttgatattcttttacacctatattatcagtggaggccttccatgttatttcaacactattggcagaaactttagaggcatttaattcagttggttgacttggagctactgtatcaggagtttcattatttactaaatttacatcaactacattataaaaagcgtttgacgtatctgctacatcccatacagctaaaataacatgataaccattacgatcagttggtacattaattgtatgtgttaaattatttgatgcggccgaaccgtcatgtttcacagttccgattggttctaattcagcacgtgttaatggtttgttaggatcccatccttttttggtaatgtaataatgccatttacttgtagaatgtggcgctgtatatttccatgtaaatgtatttactccacctttaattgtgtttttgaaccaacgatttgatgtttgttggtcaagaatacctccaaacaatcctcctgccgaagcaatttccccatcaatcggtccactatctggaaatcctttaggtgcttctagactttgaggttcatacattacatttccacaatttaaatttaatgccccataattctgactacataaagcagcacgactactcggcttttcaacaaacccatgtgcatacgcactttgaggagtcattgtgattgccgtcatgcctgcagccaaaacacaagcaccaatcccctttttacttgttcttaatctttccaatttagatgttaatttcaatttcatttttgtccccccaatatattgctttcgctaatataatagcaatatagggataaacgaacaaatcgtcaattaatatattaatatctctcataaattggtacatttattattatttttaatctcctataaaaataaagtaaatacaattaaggaattttgtaacattatgtattaaaagaagaataaaaaccccatttaatttcacaaaaaattcaaatattaaaacaaaaaaatcctcatgtaggaaaaataaattttttatattacaaaaagaaaaaaagtctggaaaaaaccgattatatccgtttcttccagacttccgctacttttataccactcacaaatcctttaaccttaaacatatacacttgaggttaaaacacatataatacccctactaattcaaactaacgcttaattacttataaaataacttaaggtatctagcttaactgtattttctttattaatagctattttctattctgtatttccttactttaaacagattatcaagaaattgttaacgtttaagaaaagagaaagtatttaaaaatctagttttaactatcaaattttaataatttattgtgttatttttatctaataaggcacagaaacaaaagatgaacttcagtgtgctttagaaaaggttcttagggtgaaacgtttaaagggtattttagtactgggtttttattaaatgttcctgtacctaatatttaaattaacggatgtcaaaatattttacaatacgagtattaaacgttacatatttttatataaaatgatacatttcatcaacacgcctcttctaatctttatgataaatatagaaaattcggctctttaggattttattttagaattctcataaaagtatataatagattagacacataattgtcacaaattaatagtttatctactttatgattacctatgaaaattttattaccacttcaatatttatcgataaactaaagcactctatacttacaatttcttaaaacccttttaaataatctttcaaaagagtcgctagttttatattttttatttttttattgtacatttgtacatttgatgttaggattatgcctattaaaattgaatcctaacgattcttctttataatttccatgttttaattgttaaataaaaatatagattctgatatatatttaaaatcagaacgaaaatgtcgttattttacaatgatttcgtggaatacctttagaatggaaagatatatgcaacaacgtgttaagggcttacagggggaacaaaaatgagagacttttttgatgataagtataaaaatattgaattaaaaaggaggttaataaatttaataagtgaaattagcgaattcaaaggaaaattagctgcttatcaggaacaaaacccagacatatttaatagcttagaaaaaactataccactacattacataaaaaatttcacaactatttatgaggatataaaagttcctaataaaagattaaaagaacttattttagatgatatcgtacctcaaaatatttcggaagatgctattttttgctattatcaaacactttcttttgtacataaaaactcctgtactttattaatcaatccagcaactatacaggaattacattttcaactaatacattacattacctctgacagtgccaaatggcgtgaaaaaccttttatcattccaggaattccagaacatggaatgcacttgaatagttaccgcattcttccgcatgaacttattccacagtttatggagcaattatgtgatcaatacaactcattaaatactagtaaggggctacattcacttttattaatagctcgttttatattaaatttttattgcatagtccctttcaatcaaggtaataacaggctggcatttatgttaatgcaattgctgttaattaagagtggacatacatttgtaaaatatgtatgtttggataaatatattaagaaacatgaatctgattattacaattcgctttataaatcttcggtgaattggtactgcgaggaacataataatagcttttggttaaaaacgtttttaaccattatattagaggcttacaaagatcttcataacacagttctagattctatatgtaaacatactaaagttgagagaattcaggattttatacttaaacaaaaacaaccctttactaaggaaagtattcgtaacacttatccagacattgcagagagtacaatcagtaaggctttaaattccttgcaactgtttggccatattaagctagttacaaaaggaagaaacgcaaagtggattaaaatttgaccatactttcaagatatctgagcttcaaaaattcaataataactttatcattgaatttcattttaattttaagctattattacttttttagttatttctaattccaacaaaacagtttataggaaaaggtccgcttccctccgccttttcctataataaaattaaatatagacatagaataattgtcgaaaaaagtcgtattttaatattttttctttattttctggttgtaaacgtttcactttcatgttaccatcttaatcaaacaatagatggtaacatgaaagtatttctttcccttagaaacatataaacgtacggtaatatcaagaaaataaggccaaagaaatatttgatacctaccaaaataattaataggaattttgcgcgttttttctgttaattcagaaaaaacattttgtccctaaacaaaatttgttagcgcgcaaactttaattacactagaacacccaaataaatgtactgtctttttaattgagcattaagatatgaaaaaagagttcttcctacaaaattcagctgatgaacttaaagatatctaaattactaccttaaacgccatctattgttgacaatatatttatcaactatgaaaaagagcctatcaagggttcttttttgttatgatcattcaaatttcaattctatcttgatacttagattcccccacaaatcacctctactttttttgctctcaattattaatttccgttcccaatttaattgaatttgtgaataaaattccatcttataaaaataataaatacaactaatcgttatatattaaagaggtgtcaattttgtctttaaatgaagagattttagaaactaaaacagataaaaacattgaaaagatccaaacaaataacttaaaacaacttaaaaatacactagataatatctttgatattagtgcagatttaattgaacatcctttgcaattaaaaacaagcacaaatattttactatattattttgaaggacttacagatagtgtcgcattaaaaagcaatgttgttacaccattattacaaaaagtgaatgaagacagtcaaatatttaattctaatattattgctactcataccaaaatagtatatacatggaatgaaattaaagaaggattacttgaggggcaatgtgtactatttatggaaggagaaaatcggtcacttctaataaatacaaaaggctgggcagagagagcaattcaagagccaatttcagaagttactattaaaggatcacatgatggtttcattgaaaatgccacaaaaaatataggcttaattcgtcgatatcttccttctgcagagttaaaaatcaaaaagttgacgattggagaacgggccacttctttcgtatacttaatttacttaggtgatgtagcaaacgcagatgtagtccaagaagtagaaaccagaatctgtaaaattaaaacagatgcaatattgagcattggtgaactatctaattttacaaaggatcaaaattggtctccttttccacaggcttatttaagcgaacgcccagatgctatttcaaatcatatacttgatggaaaagtagcggtgttaatggatagatcccctggcgcaatgattgttccaatgaatttaattggattctttcaaactccagatgattataatattcattggctcgttgcatcattttttcgcttattacgatttgcaggatttattatagctatttttttaccagcattttatatagctatagtctcttttcactttgaaatcattcctatagatttatacacttctattgcaacgtcaagagtcaaagtccctttctctcccttattggaagcttttataatggaaatcacactagaaatgctacgtgaagcgggtattcgcttaccacaaccaattggacaaaccattggaatagttggaggaattgtaattggacaagcggctgttcaagctggtcttgttagtaacgttatggttatcatcgtatctattacagccattgcttcatttattgtttctaattatgatttatcaagttctatacgccttattcgttttccaatgatgttattggcttacttttatggcattgtaggtattgttagtggattaatgctcttatttgctcattttgtttcactaacttcatatggttcaccatatggattgccaatcgcgccatttcgtctccaagagttaaaagattcttttgtaagatttcctatttctatgcttaccagccgttcgagtacagggcagccgaaacaaagaaagaaaaaagaaggtggttaacatggggaatcttaaatttaaaaatataactttattcgaatttattattttcatccattcgctgcaacttgcatctggtatgttaattatgccaagcccacttgcaactactgctggcacagatggctggatttcaatcattcttggatggatggttacttctataatcggtgtatttattatattaatgttacaaaaaaatcctaacaaaaatttctcacaaatcttaaaaacatactttggtaaatggatagggacaattctttttcttacatatgccttttatctattttttgctggatttaatactttattaaaggcaactgatattgtaaaagtgtggatattcccttccactcctgcttatcaaatcaccatattattactattaccttttattattttagccttgagtgggttaagggctcttactagttattctatgcttgttttcttcttcactacttggatgccactatttcttcttttttcactaaagagtaactacaatcctttacacctactacctatttttaaagagggattataccctattttaaaggcaacaaaagaaactattactccttatgctggcttagaaattgcatattatatatatccgttcttacaaaaaaaacaaaaggccataaaaggactactaatagcgaatactggaaccatgtttttctatctatatgttactattctttcttatatatactttagtccagaggggataaaagacgtaatttggcccgtatttcatttgttacaaggggttcgtttttctttcatggaacgattagaaattatttatatcgcttactatttaattgtattctccactactttatatccgtatttatttttcagttttgaatctatgaccatatcacttcaaaaaaacgcccgaaattgggcgctgcttgcttttatgttatttatagttgggctatttattttcctaaatcccgatgtggatgaatatttgtttatatattctcttatggatatcttaaatgtcattttctttattctattaccaatcttatttttcgcttacagtattctttttacttggattactaggaggaaacaactttgattcgaaaatggatatggattgtaatttgttgtgtgtatataattggttgtagtcagagaattcctcttgagaaggtttcattaatccttttaattggcttggatagaacctctaatggaaacataaaagttggaacaagcataccactctttcatcataagcagcaaaaaagtactatagagcattggacacaagcatcaactgtatataatggattcagtaagatagatacgaagttaacgggatatctgacagcttccaaagctgaaatcattttaattgggaaaaaattagcgcaagaagcaaattggttgcaggagcttgattcttcttaccgtgatccttacgctaccattaatgctaaagtagtacttgtagatgggcctgcagaagaaatttttaaaatttataagcctagtaaaccatcactatcatcttatataaatggtgtaatcgaatcctcaattcaaaataaccaatccgtctcttctacaattcagcaattaatgagagaacaaaatgaagatggaatgacgcaaactgttccaattatcaaaaaaacaaagaatgaaatcgacacagtaggaattgcatttttaaatcgaaaagggaaatatttgacttatatccctaaaaaagatgttaaatttttcaatcttataaataagccaaaaagtaacgggcgaatgatactacaccttgcacttcctcctaaaaattccaacaaaaaaacaaatacttctatcttcgtacagaacgcgacaaggaaggtagatgttacttttcaaaacggaaagtttgtatttaatctcgatatatatgctaatgtagctttaatagaaaaaaccaatcctaatttaattaaggggtactatgataataaaaaaaatataaataatttaaaaagtgctattcaaaaagaaattaataataatttacaaaatatgttgtatgaaatacagcagaataaaattgatccaatcggattatccctatatgctaaagcatttcaatataaagagtggaaaaaagtaaaaggagattggtcgcaagcgttagcagaggctaaaataaatgtaaagacacacgtcaaaataaaagatactgggaccattagaaattagtctaatatttaatagcatttcttaatagaattttccctcttcaataattattatgtaaaagatactaattcaaagaaagatctaatggttaaatgctaactactagatctttctttttatctaagtatttttttaggattacaattttcctatagtaaacaagcacaggtttctaaattaagttactggagaatatataactctggtgcaatatccctaccagctttcattccaataataactccatgatataacgtcaaagatgaaatcccttaacttaggtatttgactttttaaatttatacaaatgtcttagctctatgtactgtgatatataggtccacatcaatatgttattgcatcatatactgaacagataatttaaattacttttataaaggatgatgaggatgaacttagaagatatacaaaaatcctatggcgtaattgtaagtttaggaggattgtgtcaagtcaccaaccaaatcaaaagacacaatttaagaacattttctggacctttagattggttttattatccatcactttcagatgtaaacagattacttcaaaatcgatttaaaaaatttatgaagttggaaaatatggttatagaaggttcagaaagttacggtcttattgaatcagaatttgataatcaaattaaatgggcagaacgaattacctactgtataaaggacacttattataattgtttttcaatgcatgattttcctattaattcagaaaaggatttgaaatcaacctatccttcttttaaagctaaattagacactagaattaatcgattctttgaaaaaataaatagtagtgaatccattttattcattagaatttggggaaatcgagatgaagcggttgaattacaaaacgtattatctaaaattacaaataaggattttaatatccttattgttaatttcaaggagggtatatctaatattgttgaacaaaattggggaatatcgagggtttgttcaattgaactcccacgttatcaggatagatgggaaggtgatgattccgattgggatgttattttaaacaaaataacattaacttaataattttcttcttacttttaacatgatttggcccgtaaaatcaaataggtgtagagaaataaaattcctgtctaattgatacacacttaattaacaaaacgttcatataataattcgtaagtccttctttattgaataaatagttctttacaaaattagttccatcactagagcacctttatgcggtgctcttttttgaatttataaaatgtaaaaatagttgttccattttccttcaaatggctaattccctttgttattcttctgttgatttctgtataatcatttatgcgatcagcatattctgcttatgtagtgcattcacgactacttacttccatactttatcttatattttgtcttcttggatatttcattataagcttcttcaattcccttgatttccttccccttcttttatcttaagaacaagcaatttctttcatcaatattaaataaactaaagcatagattttaaaagaacctaatttacatataattaatgataaactacaatgtgtattctccacgtttaatcaacatctgaattataaatctaacatattttttttagttgattgtcattatgtataaatgctaacttaaatatgtacattaacgcttgaataaatatgtacattttcgaataacgttttttgacacttgggggtagtgcaaattcttaagttgatgggcatgtgatgtgacccttattacagataatactgcagctcatgctattcaaacgaaagaaataaatgcaattattgtaggggcggatcgaattgtcgcaaatggagatacggcaaataaaatagggacaatgaatttagctattttagcaaagcactttaatatcccattttacgttgctgctccactgtcaacatttgatgttacgaaagaaactggagctgaaattattattgaagaaagagatgaaacagaagttacgaaaatctttggaaaacaagtagcaccaattggaacggatgtttataatccagcatttgacataacgccgaatgaattaattacaggaattattactgagaaaggtattatacgcggggactataaacgagaaattgcatcattatttgaaaaacaagctaatacatattttactgaagaacaagaataatggattttagggctaactctagccacgaaggcatgttgttaaacaattatatgataataaaaaaggtggggaatccactccttttatcacgacatgttttttattaacacaattagcgattaaaaccatgaaaataggtgtatcaagcaaagtgttgatacacctattttttatagcctctattactacttttattcaaaacatattttgaaatgtattgagccaataatataacaatacactatattttatttatgcacgtctcttttgaaatgcatttgttccattttcgattatcatttgtagtactgttttccatacactatgattaggatttggttcttttcctttgcccatcaatttaaattgatgttcataccaagtaagctctaacatagaagatatttttttatctagctttttcacacctgttcgaattggcttgatcgtaactgtgtaataattgccatgaataatctggtttggaaaatcagggtttaatgcaaatagctttccaacgccaaccatgtctacagctccactttcaattgcctcattcataccttcttcggaacggaaaccgcctgttacgaccagtaccgcttgtacgagtgttcgagccttttgagcataatctaaaaaatatgcttcacgtttttttgtactttcacgtactccctcaaacattttaggattttcataattcccaccagaaatttcaattaaatccatacccaaatcgtccattttttttagtactttcatcgattcttcctcggtgaaaccaccacgctgaaagtcagcagaatttagttttaacccgattgggaatttctcaccgacttgtttacgaatttcataataggtttcaattaaaaatttcatacgcccatttaaatctcctccccattcatcttggcgctgattatgatgaggggataaaaattgattgattaaataaccatgggctgcatggatttgaacaccagtaaaaccagcctttttggcaatacgagcggcattgccaaatcgtttgattaactgccaaatttcatctgatgttaattctcttggtttattgaagaaatctttaatatcaccagtaagtggaatggcgcttggagcaaccggatttttagataatgttttcggagattgtttaccgggatgattgatttgcatccaaagctgtgtcccattttgcgtcccagattttgcccatctttttaagatatctaaatcacgttcatcttcaataacgacatttcccggttcgccaagtgcctcacgatcaatcatgacatttccagtcatgagtaaaccagccccaccttgtgcccaacgaccatatagttttactagttcttctgttggattattgctttttgttgccattgtttcactcatcgcagctttataaaagcggtttttcacagtgaatgtagttgatctattcatcgtcgtatttaaaagagtctttttcattttttctatcctttctttatttatttgatggctcccaatgctcatcaatgtaatcatccatctgttgaagtaaatttttcaccatttttaaactattattttccgggtcaatgtaataaaaattcatcgtcgcaacacgtcttacattgacaacctttgcgtcttttagcacttttatgtgatgggaaacagcaggacgtgataaatgtgttttacgtgtgatttcgcctactctcattccatctccacagcccgcttcaattaaggtaacaatgatcgattgtcgtgtggagtctccaatcgctgttaagacagtttggcatgctttaaaatcatctgttaatttattcaatttttgtacattcttcatccactgcatctcccttcgtttaatcgattgaaccattcaaatcttatcataattatttcacgaataatcaatgggaaagaaaatggagaccattgaatttcattcccaatttttacagtaagtttccacaattatttttaaaattagctttgcttgaagtaataagttttatgaatctaatccaaaaacaagtgactctaaaaataggatatgcttcctctttttattgccacttgttttgattgcctatttaaaattcaatacagttaccttttcacgtgtcatagactcaaggctcttacgaataccttgtgcacccatacctgaaccttttacaccgatgaatgggaagtggtcagggccgcgctctgtacgtccgttaatttgaacagaaccagtttcgattttattagcaattgcaaatgctttgttaatgtcttttgtgaagacacttgcttgtaagccgaactctgatttgttagcaatttcaattgcttgctcatctgaagaaacgcggatgattggaaggattggaccgaatggctcttcccaagcaactttcatttcttcttttacgtggtcgattaatgttgggtaaattaagttacgctcacgtttgttaccgataacaatcgtagcacctttttctacagcgtcgtcaactaaaccttgaacgaagtcagcagacttgtcatcgattaatcgaacgattgtgctatctttctctggagatccaactgatagttccgctacttgcgcttttaataagtcaacaagctcgtctgctacgttttcgtgtacaagtacacgcttaatagctgtacaacgttgaccagagtaagagaatgcaccgcttacgatatggtttgcagcatcttgtaaatcagcatcttcacgaacgataccaggatctttaccgccaagttctaatacaagtggaatcattgcagctgttttcgctaaatgcttacctgtgtttgtaccacctgtgaacgataccatattgatgccttcgtgccctactaaatagtccccaattgcagaaccgcgtcctgtagctacgtttacaagaccttttggaaggccagctttatgaagtgcttcaaccattttaataccgctaattgcaccttgagttgctggtttgaaaataacagcattacccataattaatgctggtgcaagttttgcagcagataagtttaccgggtagttaaatggtgcgattgctaatacaacaccaagtggtgcgcgttggatgatcgcaagtttcgatttcgttccgccagggaagctatcgcccatcatgctttctccgtgcatatgtaaagcttcttcgattgtgtaacgaatgaagtcagctgtacgaacaacttctttcttcgcatctttatagcctttaccgacttctttcataatgatatcggcaatttcatcctgcatatttacgagctcatcagcccatttatataaatattttgcgcgatcttgtagagaagcttctgcccatgatttttgagcttcttttgcagatgcaattgcttcatctacttctccgcaagtaattgcttgtacttgtccaattacttcgtgtaaatatggagatgaaatttcaattgtttctcctgaagagctttctctccattctccatttacataaaaattatatacattaaccaccataattcctccgcctctaagtttggctcttatcaaaaagcccaataatttatcctatgttattcaatttgttcaatttagtttataagtaattttataaagttaactttcattgattcatccacaaagatttctaaaactaatatatctattttcttttgctttttcatgtgcgcacatttcctttactcttttgtttaatcattcgaacgattgaatcataacatgttatttaaagaaaaaaacatcgggaaagaaagtggagaccattaaaataagttcatgggctaaacatatacaaattaaaagtatttgtgatacgatgcttagataacattactgcaataatcatttgttaaattattttgtagcagagggttatagtaaagacaagcaaggaatatatgtaattgcaactcaaaagattacattaaagcataagagttcaaaatatctctaaataggagagtaaagactctttgacagaaacattggtaaaattctatactaaataaacgtccaagggttcgaataattaaacagggagagatatcatgagcaaaaaaacaataggcatattaagagaatgcactcctattttttcaattctgcaggatctaaatcgtcaagatatattggtgttactttatgatgaaggagaaatgtctgtaaatcagatagtagaccgactttctttatctagaccagctatttcacaccacttgaagcatcttttaaacgcaaatctagttactgttcaaaaacgtgctactgaaaggtattatgccctttctcttgacaactccattgtattattaaaacaactaattgaatcattagaaaccgataatcaattaaagaaataattaaaaaatagtgtgcacaatgataaaagtagtattttacaatgctactttttctacaaagtgaattaaaaaatatttattgacaaagataaaagagtcaaataatattttacttgcaaagcgttcgagtgttcgaacattagaacgtaatgattttagaaatttattttaaacattttaaggaggaaacgaaatgaaatacagtgaacaaagtgcatggcgtgaaatacaagcttatttacctaaaaaatatcactttacagataattatcatccaacagaagaatggtggaattggaaaggacatgaggtacatttagactgttttcgaaataaaaacgcacccgttaaagttattttattacatggagtaggtacaaacggtagacagatgtccatgattttaggaggtcctctttcaaaagacggattcgaaacgattgctattgacatgcctacctatggagttacaaaagtaaaaaaaggttctgtagtaaagtatgatgactgggtggatttagcaagtgattatatcgactatgaacaacaacgtgatgatagacccattgtactgtatggtttaagtgcaggtgggatggaaacttaccacgttgctgcaaaaaacaagaaagttaaaggaatcattggtatgacattcttggatcaaaaaaatcaacaagttcgtgacgaaacagctaaaaatctctttatgagtcgtgttggaatacctatggcaggcgttgcaagtaacataggacttgaaaactttaagatgaaaatgagtacagcttctaaaatgagtgccttatgtaataatgagaaagtgatggaaatatttaatcgtgataaaacctctgctgcaaataaagcaagcatgagattcctagacagttatggtaattacaagccagcaatggaaccagaagattttgatgtatgtcctattcttttaacacaacctgaacaagatagatggacaccgttgcatttaagtactccattcctaaacaaaataaaaaaagtggatgtgaaaatagttatgttagaaaatggaggtcattatccagtggaacaacccgcgttagatcaaatgcatgatgctatcgtggaattcatctataaggtcacaaaatagcttgacttgcaaaacattgcaattgaacatatgttgataaaaaaactccttttagcattagggagtttttttatttttggtatacaatatccattacaaatgaattctttaattcactagattcaatgaatactcttatattttcaccggtgattttattaatatcacttatttaattggtcctccagtatacattattaacggtataaagcacttatcattttgaagcttttttagctctaattcgtgtctctttatgtaatacattaattatctttgtagtacattattttttatgtgggaacaacgacaaattattgtttcaattcaatttttatccctcgtatgtctcaaataacttttccaaatactctagatttccttctgctatatattgctcagcttctatcaaacgcgttgctaattcagtctttgttaaacgcatatattgtttgtacacattctttaaatttctgtccgtctttaattgctcgaactcatgaaaagtatttttttcattttcgcgatagggaagatgcttttctagctctttttgttttttcttatagctcttactcttttctttataatacgcatagagttcttcatgatttctaatagtattaaaatgaatccctttgccttgttcatcgagttcttttgtctttttagatacattgtgtaaggtaacttctttgccctccgcaaggagggtatctattgcttttttacctagttcgaaggagttaacccttcttttttcgtaatcacgctctagaccacttttatggttttctatggataagtcttggctcattttccttatctctcctatactcctcgattaatgctatttctttcaattcagctttcgcatcatgtatcgtttttttcattttcaaaacttccagtttgaaacctttttcctcgtgatacttcttcgatttttctgcccaatctagatattcaagtaattcatctttttgttctggctcaggtattttagtgctgcatcctacacatgcaagttttgttggacaaatcttgttagtaacacatgtacccccaacggttttactaaatgggccgctgatctctctttgacgctcaaaaagggcttgtatctcttctggttgtcttaaaacttctttcatcatgtcagttgtagcggccatggaagtatgaaactcggaaataacatcggctacttgtttttgggtaggttgagagtaatatcttgtaacgtctaaatccttttgattaagaatcattgctacgacgtcaattggaaggtcttctgcttgtacagcgtgtgtcgcaaaaccgtggcgtaataagtgtggtttcaattttaccaacttcttgtcttgtgtttcatagatcaatccaaaacagatgaaatttaaaacacatgcaaaagtcacctctccaaaatgtttaccatggaactgaaataaatagagttggtctggtcgcgattcccctgattgcttcgaataacggaaatccacccttggaattgagcctttataatgttgatttctaaggtgaaaagcaatttcctttattaaatcaaaagtatcttttgtcgtataaaaaactgctaactcatctcttcctttcggaatagctctaaatatataagatgtttttccttcatttatttcgggagcagtgatatttatctggtctaaacacccaataccaagatgaacttgcgccacttcacctaaccttgcacctgaagacgtaaatatatctagtgccgtcgcaccaaacaaagctgttatatacaaaatctcaacgttcattaaaatgccctcggcatattcctgggagttagttataaaagtcccttgtgctagaatacctttatgatcgggttggaaaggtttattaagttcttttgaattgggttccctatatccataggtttcaagtactttcaacctttcatttatttgttctttatttaaagatcggtaccaacttccgattaattgatgttctaaaatgggtataaaccaaaaaccttcagtttcttctgcgggtttaccagtttcatcatctaatattgcagcgtttaaaaactcgacgaagtattcgttgttttcatctaaaaaagtagctcttcgcccctttgcattattaatggtagcgtaagaataatttttactatgatgaagtacgaaagaaggtttatcccataatcgaaacaagaaaagctcctttgatctatcttcgcgttccttgttttcaatataagaaaattcaaaaggaagaggatatccgttatcttttacaaattctacaacctcaagatatttctgtcgcaaacgcctaacctggtttaaacgaaacccaccttcggcacgaatttttataaattccttggaaattgcgtccgtttcagacttccttttccttttcgaagcgtcctttgctgctttattaactttaaaatctctactatctaggtgtgtttgagggagtaaaaaaggggcgaacatttcttgttgctcccttgtcaacttggtcgaatgccacttatgcacgttttttacaacatttttataactagtaaagagttgaattctcttgttatctgaatgggagggaagaatctcccttcgtagataatcggacagatgtatatctacctcaaaatcattaagacttgccaatttggtttcttgaaagagttgcttaaggcagagatttatacttgcaatatttgtgtgaatagtcttaggctttaagttttgattggatattaccatcaatcctagcgctaagtggtttgtaaaagggtaaccacagcacttgtttttgaagtaacgcaaatgcacagggttaaccttattccaaaagtagccttgtttatcctgatatgtaaggacgttgtcatcaacttttccttttaaatcttgataccatagtttgctttttaattcatcaatcacattcccacacccttaggcttatttatagattaactattcaattcattaataaaatccattaattcatgttgtttttcagacatttgagcaattttatttcgaggttcaaccgaaggttgtttaaatctcttacgaggttttagctgatttaaatactcctcctgatcctttttcatcatttctaacaatttattgtgttgctctaccacataatccttctcatcaacatgatgttcatagacttttattgtgtctgctttttcgctccaattcatataaatccgtaatcgtccaattgcataatcctgttctactttatccttgtatttttcgcgaatcatcctaatactacgggtcacgaaccaatgacgtgttttatgaatattgatttttatttctgcttttttcatgatgtttatccaattttttaaaaaggcatcataagtgtagggattgccatactgattaagaaatattgggatttcatcagggatttcattcattttcaaaccacttttatcaactttctttctagcaccatggatataacgatcaagtagttttaacgtgtcagtatctactttcaaaaactttgttcttattccatcgcttcccttattaaatgtagaaaactcacccttatcatacctagcacgatagtctccaaatgtaagtttgataacttctgtcgctctagctccggtttgaaatagcatcgttgtaataatttcatctctaagcttccatttactatcctttccagccttataaatcataaaggggaggtgaggatcatcaataatctctggcttccactcgccatttatgattttaaaaaaagagttggttaatcttcgacctcttttagataaaggttcttctgtacctgcttctttaggcattctaggtttgccttccctaacaccctctatttgcatttcatactcgtctaaaatagcgtgtgcatcaataagtggattgggagaaaggtatattttcatacgtatcatgattttgtagaaagattttaaaacacttaacatcctaccgacagtattaggacttatatttgttaactttacattgtaatacgttttgctatcgcttgttgtaaccttgcaatgagctttatgcatcaaaaaatcctctatggctatccgtacaatgtggggttcatcatcccaatttacagctcttccttgataattactgtcagtatgcaaccaggtgaaaaaagtatagagtgtttttagataggattctgcactactttctgtaattccacccaatgcctccttataaaaaactgtaaggggaaagaatggtttaaggtgtttgtccagtacaattaatttaaatttcttagcttttaccccttcggggcattttacgtgatgatacaaacttcccatctttatataaccacctttattcctgttccagccaattgtagagaggaatcgtttctgtctgttgttcctttaatgccaaagattcatagtcacgctgtgtcaaatccactaatctctttttttctccatctgcaattggatctggcatccaattcttcgttttagctgctttgacaaacttgtagggttcatcaatcggtctactttgttgccttataatgagacaaatttcaagcacacgctccaatggtaaagagataagaattttatgtacttcttctggaggggaagtaagagttgtcacttgatatgccaatttgactaattcagatttgttgtaatccggagatagagatttctttttaccttgaacttttgctagggaagagccagttaacgttgctacatcgcttgcaggtatcttccaaccttcttttcgactattttgaaaggcttttggaaacattccatcttttatctttctttttatagtttcttcattcttatagcccattagggctgctacttctttaaccgtgaaacacttctccatataaatccccctttagtatcacttgatttgtcatgctgttaaacaggttatacgttctagtgtgtcccacaaaaaggaagtataaacaataatcggtagattttgcactgttaagtaaagaaattatataaagataaaaaaatacactccattcaattaattgtcagaaacatgacagataaataataaaaagactagctaagtggctagtcttttttctcgtattttgctactaaacttttcggtaattctttggtcatataaacagcaatttgagagaactgctctggtgtttcctcaaaatcgcttctaatccattcaccgattaaactcgttaacatccctgacaaaacggcaaatgcatatctttttggtatgtttggaataattactactttcttatcgatccaaattgattcaaattttcctccgattttacttagaaaggttggatcctctttatcactagttaacagacggataagctttttattatctaataagtaatttgccagcttgataaatgtagtaataaaagtggtcataaagaggttgaatgtaatgataaaaacataaaaaatagacgtatcaagcaaagtgttgatacgccttaaaactacattgttaaacaacatgcgtcgtcgtgtagtaataatgatatttatttaattatcttaggttcagtattacatattaatagcttgtttttttatgcctaaatgcagtgttttctcttacttatataatgaaaggaggggaagaggatggaagagtggatcaagatgataggtaatgtagggtttccgattgttgtaacattatatttactccaccgtattgaaagtaaactagagggggtaattgttgcaattgagaagctcccgcggcaattactaaagtacgaagatcctcgggaataaaaataaagtttgctcttcttgagcaaactttatttttattgagcggtataaccaccatctacaacaacagcttgtcccgttatacctttagctttttcactcgctaaaaacatcgcataatcagcgatttcttgtacttgtaataagcgcttttgtgggacgagtggataaataacatcttctaaaacattttcaagtggtacatttcgtgtagtagctaagtcttgtagttgattacgtacaagaggggtatcgacataaccagggcaaagggcattaacagtaataccatgcgtagcaccttctaaagcagcaacttttgttaatccaattacgccatgttttgcactattgtaggcagcttttccagcaaatccgacaaggccgttaatagaagcgacattaataatacgaccatatttttgttgtttcataatcggaaaggcatgcttaattgcgataaacggagcaatttgcataatttgaattagtagctcgaacttttcagttggaaagtcttcaatgggtgaaacgtgttgcattcctgcgttgttaattaatatatgtaatgaaccgaaatgatcaactgtttgagaaattgctgctgtaatttcctcttcagatgtaacgtcacattttaaaccgatagcttgaaaaccttcattttgtaattgttcagcagcttcttttgcacgttcttcaagtcgatcggtaatcacaacttttgcaccttcttttgcaaaagcctttcccatttcataaccaataccacttgcagcacctgttaaaaagacaactcgatttgtaaccatgatgaaaaacatcccttcataataaagttttcatagtgctctatttagagaagctataatgaaattcctgcaaacatttggaaaaaaatatcgttaggaggatttaaattatgtcgacaagtcaaatgctgaaagggattttagaaggatgcttacttgctattatttctgaaggcgaaatatacggttatgaaatgagtgaaaagctagcgaagtatggttttacaatggcgagtgagggaagtatttatccgttattaatacgaatgcaaaaagaaggactaataacaagcgtaatgaaggaatctccatctggtccaaagagaaaatattatacattaacagaaaaaggcgaggaagcacttggtgaatttatggatcgctgggaagcgatgcaaagtagtgtagagcgtctacttgaagggaaggggagaaaaaaataatgctatcaagtgaagcgcgaaagtttttgttagatatgagattatttttgacggcaaagagtgtaaaagaaagtgatattgaaaactttttagaagatgcagagttgcatttaatagaagctgagagtgaggggaagagtgtagaagatattttcggaagctcaccgaaagaatatgcagatgaacttgtaaaagtgatggaaagggatagacaggaaacgtggaagcaaattggttttacagtaatgaatatcgtatcgttttggattattgcttctatcttaatagtgaaccatggaatgttacagatttcacttattcagtgtatcggttatagtttttcatttattttagttgttataggtcctaattttctacttcgcaaaatgacttttgtaacaagtttttcaaaaacgtggttttctatgtggtttttagtaatgatagcgccaatgtttttaatgggagttattatggtactagatgtgatatatcctacaaaaatgtttatattcaatcaaatgcaaagttatttattggctggtggtatttttatcattacagtagcggtaaatatgtattttgatggatggtttaaaaatttatatttaattattccactttcgattatgttactatttaaaacatttacatcagaagatctcgtgccaatgttatttcaaattatatgtttatacggaagtttgtttattttaatcttccttgaaattatgatgaagacgaatagaagagaaatgattaaataagggaggagttataatgaagatttctaaagaaggtgaaaagtttttaatcgatacgaaagtatatttaataacaaaagggattaaagaagaagatgtggacgcttttctagaagatgcagagcttcatttaatagaaggtgaaaaaaagggaaagacagtaagtgacatatttggtgactcaccaaaagagtatgcggaagaattagcgaaagagatggagaaggataaaagcgggagcataaaaagtattttagggatgattattggtattggtggatattggttactgacaaatattttatttggaagccccgatcaacaatttacgttaacaaatgtacagttaattggttatcctatcgttttaatcattacgattattggaatgattgttgcatttagaatgtcttcttttaaaagtaaattagtagaatttggaatgatttatgtaatagtaatggttcctattttattattggtgttattgatgtttatgaataaatggtatgggacacctgtattgcaattgtcgacaatgcaaacatatatattagcagcaattatctttttattacttcttattggtgaagtatatgctcttggctggatgggtgtttttgtactaattgttcctcttatgattatgttcttatttaaagatttagaagaaagtaatgtattttggggaattgcaaaggtcttacttatgtatggaagtatatatggattaatgaaatggtctttaaaaattgaagaaagaaaaagtatgaactagaaattcaataaaaagcggctgctctggatataccaaaaattatttccaaagaaatattatatagggatttttagagggattacatttacatttagttgtctatttttatttctagcagccgggattttgtttgttgattggaacaagttgttttaaacagtaacatgagggttactgtttttttctttgtagtaaagagctttgtaaagagagcgctttttgttctgttgttaataaggaatgaatatgaacgttttctggacgagggactatcggatacataagatttgttggagaagggtggtgctccgagccggttggagaatgaggatctgcatgagtaagttttccatgaatacgtcttgtaaataaaatatgaccgatttcgtgagcgagcgtatatatatttttcgtaggggcagccgaatttgttaaaacgatatagccagtaagttgctgttgttttgctaaagaataagcgcaggcaattactgctgtttctttgaaataatcactgccaatataacaaatataaaggtcgcattcaggagcttcatttacacatgtttggaaaaaggatgccaacttttcttgactttgaatggaatttttataactgatttcacggtcaaaaaaacggaaaagttcatttaatacaattacttcttgaatttgaaatgtaatggggtgccaaattgattctgcaacagctaaatcttttgcgatgcggtcatcagaaatatcggcgccgggagtaatgcaaatacatatattgacgtatggatccataaggaacacctcaaatgaaaaaaagttcttcctataatatatgtgggaaaaagatgtcatgtatggataaacgccttctttattgaatatatagatgacaagtcgaaaaaatttcatagttctataacatggtgtggtcgtctttttgatatagtaaaggaaagggggagaatatatgtatacattaaaaatcgtttcagacagagaagcactttatcaatttgcgagttatgtaagagttgtacaaggggttgaagatgtatatgtagaggtgggagaacctttatatgaacatcctttaatgaagttttatgtacatattaagctgaaagaaacatatgagcagcataaagcgttacaggaaatagcaagattagtagaattgggtcgttttacatatgtccattatcgtaatgatgaaattgaggaagcttttgaagctgtaaaatatgaaagttttaagaaataaagatgaaaaaacggaggcgaaagcttcctttttttctttaaaattacatgaacaaaaagagagaaattttgttatgataagggaggttagggaaaggggaatttacatatggggtatattgaagagttacgaaaagtcgttggtacaagaccgcttattctcgtaggatcagcaatcattatattaaatgataaacaagaagtattgcttcaatatcgttcagatacatatgattggggtgtacctggcggggcgatggaactgggtgaaacgacagaagaaacggcacgtagagagttatttgaggaaacggggttaactgcaaaaataatgcaatttcttggtgttctatcaggaaaagaagtatatttccgttatccgaatggcgatgaaattttcaatgtcattcatctgtatcaggcacatcatgtgagcggggaattaaagctcgatcatgaagggttgaaacttcaatattttccagtagataagttgccaaaattgaatgaaacgacagagaaaattttgcaaaagtttttatatgcactgacagaatagaaggttaattccttctatttttattatattaaatattttgattttttagtatgtttatagtatgatagttatagatatacatcttatggaatttcacctaaaaacttactagggtacataagagaggggcaagtacaaaatgcataatgttgttattacagctgcagttcgttcgccaattggaacttttggaggagcgctaaaaaatgtaacgccagtagaattagctgttcctgtacttcaggaagctgtaaaacgaggcggggtagaaccacatgaagttgatgaagtaattttaggtcattgtattcaaagaactgatgaagcaaatacagcgagaacagctgcattagcggcaggatttcctgacacagttacgggatatacaatccaacgtcaatgttcttcaggtatgcaagcaattatgtcagctgcaatgcaaatccaattaggtgtaagtgatgttgttgttgcaggtggagtagaagcgatgagttcgagcccttatgcattgaaacagcaccgctggggacaacgtctacagcacggagaaattcgtgatacggtgtgggaagtgttagaagatccgattcaccatattatgatgggtgaaacagcggaaaatttagttgaacaatatgaaattacaagagaggaacaagatgaagttgctcttcgcagtcatacattggcactgaaggcaatcgagtctggacactttgacgatcaaattgttcctattacaataaaagaacgtagaaaagaagtagtattttcgaaggatgagcatccacgtgcagatattacagcggaaaaattagcaggattaaaaccagcattccgtaaagatgggtctgtaactgcaggtaatgcatctggcctgaatgacggaagtgcagttctagtattaatgagcgaagaaaaagcgaaagaaaaaggcttacaaccgttagctagaattgttggatattcagtagctggagtagacccgaaaattatgggtattggaccagcaccagcaattcgtaaaggtttagaaaaagtagattggtcattggaagatgcagatttacttgaaattaatgaagctttcgcggctcaatatttagctgtagagaaagagttaggcttagaccgtgaaaaagtgaacgtaaacggtagtggcgtaggacttgggcatccaattggttgtacaggggctcgtattacagtaagtttaattcacgaattaaaaagacgtgggttagaaaaaggaattgcctctttatgcgtcggtggcggtatcggggttgccttatttatagaagcactataaaaaagaagcagctattgctgcttctttttttacgactcaaatagatgatgaaataatcgatcacgattttcaaagagaagtttcgtcgtttggtaatgctcagtttcttctaatgtggattcgtgaatcccttcttgtgttaaagaatatatagtggattcagggtaggccattaaaataggagaatgcgtcgcaataacaaattgtgaaccttgttccactagctcatgcattcgaataagcatggaaagttgtctcattggtgataaagctgcctcaggctcatctaaaatgtataaaccttgtcctgaaaaacggttcataaataaggaaaagaatgattcgccgtgagattgttcgtgtagtgaaacgccgccgtaagattttatagcatctatttcatcaatataagaagcaacgttataaaatgattcagcgcgaagaaagaaaccgtcgtttggtgtattgaaacttttggaaattcgaaggtattcatgtaaagatgaatgtgaatcgttagtgctaaagcggaaattcttcgttccaccttctgcattaaagcctaacgcaattgcaattccttcaagtaatgttgatttacccgttccattttctccaataatgaatgttacatttggatgaaaaactagtgattgtaatgttcggatagcaggtaagcagtaaggatatgcggaaaaactagggatattttctttttttaatgtaacattttgtaaaaagggtacgtcaatcaatatataaacctcaattcataacggattttgattctaaaaaggcggcaaatacaagtgttaatgacacctgaattccttccttattttctgaatattttatgtggattatatcatttaaactatcatattccaatgtgaaaataaatattgcatgaagatccattctctcgttatgatatatggtattctattgaaaatgtgagaaggagttaaagtatgccgtttacatttgcacatccagcagcagttcttccttttgcgaaaaagcattctaaacatatttcagtaacggctcttatattaggtagtatggcgcctgactttgaatattttttacactttagaccgtatggtataattgggcatacgtggcttggattcttatatttcaatttaccacttgtcttcttgttagcatacatatatcattacattttaaaaaagcctttcataacacatttacctaaaccgtttgctggctactatacatatgcagtagacaagcggtgggggcttcatacatggaagcatctttttgtattttgctgttctgcattattcggtatgctcacgcatgttgtttgggatgcattcactcataagacaggctatttcgttatgaaaataccattattacaaagagaatggtacggtatctctgtttataaatatatgcaacatggaagtacatgtattggtgttctactattagtatacgttttatggaagtatagaaatgaaatgggtaaagatcttattttagcttcggaaaaaagaaagtattgggtttcagtaattgttgtagcaactattatatttatcgtgcacgcgttcctagatccctattttcatattttccaaattggaggtataatagtatctggactgacaagttcattttgtggacttgtcattgtttctatagtttacaaagccagggactaattttatattcatgaatgatagcgttaggagaaatgaaatgatgaaagcatggaaaagtatttttgttttatgtagttttcttcttatgttaagtggttgcttccatcaagaagaaaagaaagctgaaccgaagaagaaagaatctattcctgaaacaaaagaatatggtgggcgtgagctgaaaaaagtaggacaaaaagtgaaagaaacaggatggggtacttttaagttagagcagatgcattctgtgaatcaaacatttgaagtagcgccaatgaaaattcacgtacaagatgtgaaagtaatttctttatcacagatgagtgaaaaggcaaaaaaaacattgaaagtatacacggcactaacccctgaagaagtaaaacggagattaggggataaagtaagccaagaagatgcagaattatatgcatcgctaagtggaacagagattagtaatacaattcgttacgttgagattacatataaagtggagaataccggaaataaaaatatgcaatttttctctatgaatgatgttatgattaatggtaagcaacattttaaagtagccactcaaaactttttatatgacgaagatacgttagttggtacaaaaaatgtatcaagagaagactataagcctggtgaaacaagagatggtattattggtttaatacttgacgatggaaaagacaaggtaaaggatattcagtttacaactgatgatttacttgcaggagattcagaaacacaagatgttgtaaaagagccacaaacgtttaacatctcactaaaataatgtaaggcaaaacagtcagcattcaaatattatgctgactgtttttttatttcttttatgtatgaatctacattttgaaaaggcaccttaattttaaacgcatctttttgttcattaaattgcttttcattgtagggaccgaaacgtttattgtgctttacgtcaataatccaataatgttcactttttttatttgcaattgctgcgtcagggttattcggatctgatttttcctcggtttgttttgcaataatgtatttatcatcccaagcaatgtctgtaatttttgcagggatgtattgtgtggcatatacagcatcttgcgaggggaaaagttcaaatgcatttccagaagtacgtatgagttcgtattcatcgttaaccgtataagttaagtgacctgtgtttcctgtacaaccagttaataggaaggcgacgaataggattatccattttttcaatatgggaacctcctttataatgctattgtaacaaattgtacaagaaaagtaagagaaaggctagtttacaatgttttttagaagtggtacgatgagacgggtaaagaaggatatgaaggagtcgacataaaatgaagttaaagatgcatcgtccagcgcttgtaatgaatcgcataggtgcttccctaattgacatgtttttaatctcggttatgtatggtgtagtagtagctattatgaccggaaactatagtgctatgtttaagcgctttaatataagcttaggtgattttagatatgatttcgcagtagtttttatattaatggcgatatattttattgtgttaccctttatttggaacggtgttacacttggaaaaaaggtaacgagaataaaattaatttcattgaagagtgaaaagctaacgttgcaaacattaattataagattttttgtagtgttattaccgaacgtattgctattaggaattccattaatatgtaatatatatatgatgttgttccgcaaagataattgtggttttcaggatttaattacaaaaacgaaagtaataagtcttgtataatgaaaaaaagacctttttatatataaaagggtctttttgattttataagtatatggggaatgtttacagtaaggaaaagctaaaatgtgttaattctatttataatagattgaaaaataagaaaatgatataatgattaaaaataatatctttattccgccatattggggctgattaaaatttcactttatataataagggggagattaaaatgactggaggtagtgtaatcttttgggggattttaattttcatcggtttagttttcgattagcgtaataataagaaaaaagaaggataaaaagtaaacgtttacaagtaaaatagcaatttttcttgcttgcagattaatcttataaaggagtatactgaatgacggtaagacttatagaaggggtaatgaaaatgaagcttgcaggaaaagttgctatcgtaactggcggtggcatcggtattggacgtaatacagctcttttgttggctaaacaaggcgcaaaagttattgtgacggacattgatcaagagagtggacaagcaacagtggaggaaattatgaatctaggcggagaggcactttttgtatcctatgatatgggaaagcaaggagattggcaacgcgttattagcattactttgaatgcattcagtcgcattgatatgctttttcaaaatgcaggtttatataaaatagattctattttttctcgccaacaagagaacgattccaatgtactttgtattaatgacgtttggatagagataaaacaattaacgtcatcttttatgaaacagcaagaagaagtggtgcttagtgatttaccgattttcggtattattagcacaaaaggacaatcatttcatacagtagaagccctagtataataataaaaaccgccctcaatatatgtggacggtttttttgtatgtgtatagtaaagataaattttttagcgaatacgttgttcagtttggttatcaaagaaatgtgctttattcatatcaaatgctaatttaatttgatcaccaggtgaaaatgtatgtcttgcatctacacgtgctgcaaaatcttgatttccaagtttcatatataaaatggattcagcacctaataattcagcgacttcaatttttgttgtgaaggcagtagattgcgaagcttctaaaaatagtagttcatcatgaatgtcctctgggcgaatacctaaaacaatttccttatttacatagccttgttcacgtagcatcttcatttttccttcagatactttaatttttatagtattgtctataacgaaatcggtttcagtcaatttaccacggaagaaattcatagctggtgagccgataaatccacccacgaaaatgttttctggcgtttcgtatacttcttttggagttccaatttgttggatttttccatccttcataacgacaagacgcgaagccatagtcattgcttctgtttggtcatgtgttacataaattgttgttgttccaaggcgatgatgtagcttagaaatttctgagcgcattgcaacacggagtttagcatctaagtttgataatggttcatccattaagaaaacttttgcatctcgaacgattgctctacctaacgcaacacgttggcgctgtccacctgataatgctttcggttttctatctaaatattgttcaagtcctaaaatttttgctgcatctttcacacgacgatcgatttcatcttttggtatttttcgaagttttaatccaaatgccatattatcatatacactcatatgtggataaagagcgtagttttggaataccatagcgatatctcgatcttttggaggaacatcattcattagtttaccatcaattgaaaactcgccttttgaaatatcttcaagtccagctaccattcgtaatgttgtagattttccgcatccagaaggaccgacaaatacaataaattctttatcttgaatgtgtaaattaaaatcagttacagctgttacgttattatcatatattttataaatgttttctaatttaagttctgccatggtatttccccctagaaataattatgcaaacgttttctttgagttcattataaacgaatagattcaaaaaataaataaaaaaataaaacgttttcatttattggagatttattagtggttttcatatgttttcttagaaaaagaacaataaaaattgtaagcgctattttaaattgagatagaatctgttatcattcattaatgaaaacgtttgcgccttaaaaaagagaaaaatgaatgatgaatgaaatggggtagcataatggaaaaacaatggtggaaagaaagtgtagtatatcaaatttatcctcgtagctttatggatagtaatggtgatggtataggagatcttcaagggattatttcaaagctagattacttaaaagagttagggattgatgtgatttggttatcaccagtctatgaatctccaaatgatgataatggttatgatataagcgattattgtaaaattatgaacgagttcggaacaatggaagattgggatgagctattacatgaaatgcatgaacgtaatatgaaacttatgatggacttagttgttaatcatacttcggatgaacataattggtttattgaatcacgtaaatcaaaagataataaatatagagattactatatatggcgccctggaaaagaagggaaagaaccgaacaactggggagctgcttttagtggatctgcatggcagtatgatgaaatgacggatgaatattatttacatctgttttctaaaaaacagccagatttaaattgggataatgaaaaggtaagacaagatgtttatgaaatgatgaagttttggttagaaaaaggaattgatggcttccgtatggatgttattaattttatttctaaagaagagggattaccagctgttgaaacagaagaagaggggtatgtttcaggtcataagcattttatgaacggtccaaacattcataaatatttacatgaaatgaatgaggaagtattatcgcattatgatattatgacggttggtgaaatgcctggtgtaacgacagaagaagcgaaattgtatactggagaagaacgaaaagagttgcaaatggtattccaatttgaacatatggatttagattcaggagaaggtggaaagtgggatgtaaaaccatgctcacttcttactttaaaagagaatttaacaaagtggcaaaaagcattagagcataccggatggaatagcctttattggaataatcatgatcagcctcgcgttgtatctcgttttggtaatgatggaatgtatcgcattgaatcagcaaaaatgttagcgacagttcttcatatgatgaaaggaacgccatatatttatcaaggagaggaaattggaatgacgaacgttcgattccaatcaattgatgaatatcgagatattgaaacgttaaatatgtataaagaaaaagtgatagaccatggtgaagatatagaaaaagtaatggaatctatttatataaagggtcgtgataatgctagaactccgatgcagtggaatgatcagaatcacgctggatttacaaaaggtgaaccttggattactgtaaatcctaactataaagagattaatgtgaaacaagcaatccaagatgaaggttcaattttttattactataagaaattaattgaactacgcaaaaataatgaaatagttgtgtatggatcatatgatttaatattagataatgacccttctatttttgcttatgtaagaacatatggagatgaaaaactacttgtcattgcaaactttactgcggatgaaagtgtatttgaaatgcctaaggatattagttatagtgaatcagagttatttatacacaattacgatgtagaaatcggatcaatagataacattccattacgtccgtatgaagcgatagtgttcaaattgaaataagaaaaagccttatgccatttcgaacttggcataaggcttttttggattaccattttaatatggagaatccatatggaggaagtgtaacttgtaatacacttgcttccgctgaaaattcttcgtttgtataaatgttaattattttcttaccagtaacatgaagagggagtgaaactgtaacttcactattagtagggtttaaaacgaaaaagatagtttcatcctcatatgttttcgtataagaaatataattatgttcatcatttgcttcgatgaattgaaaagtaccatgtcctccaaatgctttatgttgtttacgtaataaaatcaatgtttgtatatgggtaaataatgcatgatcttgttctttagtatcccaaatcatacatttacggcaatcagggtccatgccgccatccataccaatttcatccccgtaataaatacaaggagagccgatgaaagaaagatggaatacatagagcaatttcaacttatttttatctccgttgcatgttgttaaaattcttggagtatcatggctgtctaataaatgaaatgctgcttcatttacattcatagagtaggaatgtagagattctgtaatttgcttcatgaattcacttgctttaatggaatcgttagcaaagtaagaaagtagagcatttgtaacaggatagctcatgacagcatcaaattgatcgccttgtagccacggaagggcatcgtgccaaatttctcccaaaatatatacttcaggatttagtgtctttatttcagttcggaattctctccaaaagttgtgatcgacttcattggcgacatcaaggcgccagccatctatattgaattctcgtacccaataacgtcctacttcaagtaagtattcttttacatctggatgagctgtatttaatttaggcatatacggtgtaaaggcgaaagtatcataatttggaagtggttcggttataatcggaaattcatgaatgtggaaccactctttatatgcggacttctcaccattctctagtacgtcttgaaatttctcgaaaaagtatccactatgattaaacacagcatcgagcattacttttataccgtgcttatgacattcttcaacgagctctttaaaagtttctttcgtcccaaattgtgggtcaatttccatatagtcaattgtgtcatatttatggtttgaatgagctttgaaaataggtgtgaaatatattccggaaatgccaagcttaacaaggtaatcaaggttttgaataacaccagaaaaatctccgccgaaaaaattagttggagttggattcgcacttccccaaggaagggtattttctggattcagcgtactatcgccattagcgaatcgctcagggaaaatctgataccaaatggtgtctttaatccaagatggtgctttgaatacatcatctgcatgaataaatggaaagcagaaaaagttaccaacatcatcatttggaatgctagaaaagaatcctcgctctgcataaataagagtgtctgtttcagattttaattcaaacccataacgtaagcgcttaaattttggttcgattgcaatggaccaataatcaaataatgcagtagaacccgtttttttcatgggtgtacttgctgatatccatttcccgtctttccattcgtaaggatccccgtaaataagatcggcgctttgaatatcatctctcttagtacgtactcggatgtgaattgtttgttcatcataagcgtatgcataattatctttcggcctatgataaatggcttctttaaacatatagaaaatcccccttcaatatctctatacatagtattcccttaagtgtaataataaagcctgtattgcaaacgattgcctttctcgtagctttaatattgcttataagagtagtattcattttatataaagtcaatgtataaagagtataatgacataatttttaaattaatatttgcaaaatgaataaaagaatgtataatgatagacaaatagcgcaaacgttttcatagattgagatattgtttgcgcttcaattaaactattaaatgcaaacgttttcagttactgaggtacatagacaatttagggaggtttttgggatgaagaaagcattatcattattaacggtttcagcattatctattggtatgttatctgcatgtggaccgaaagattcagggaaaaaagaggaaagtaaagcgaaaaaagactatgatcttcttgtttgggaagatgataaaaaaggtgttggtttagaaccagcagtgaaaagctttgaggaaaaatataaagtaaaagtaaaagttgttgaaatgcaaatgacagatcaagtgaagaagttacgccttgatgggccagcggggactggaccagatgttgtaacattgccacacgatcaaatcggaaatgcagtaacagaaggtttactttctgaagtgaaagcagatgatgctgtaaagagtaaatttactaattcatcaatagaagcacagacatataacggaaaattatatggtttaccaaaagcaattgagacaccagtctttatttacaataaaaaactaatgccaaaagcgccagaaacgatggacgagctgtttaacttctcaaaagaatttacgaaagatggcaagtacggatttttagcattaggagataacttctactttgctaatgcattcatggcaggtatgggcggttatgtatttggtgaaaaagatggaaaaccaaatgcaagtgatgttggattaaataatagtggagcagtacaaggtgctgaatatcttcaaaaatggtacaaggaaaaattattcccaaaaggtattatcggtgaatcaggtgggcctgctgctgatggactattcaatgaaggaaaagcagcttctatcatgaatggcccatgggcgttccaagcaatggaaaagaacgggattgattatggcgttgctccaatgccgaaattaccaaatggtcaaccaatgaaaacgtttgttggggttaaaggatggcatgtaacaagtttctctaaacaaaatgatttagctacaaaattcactgagtgggtaacaaatgaagaaaacgcaaaaattcgatttgagaaaacaaaagaaattcctccagtaaaatcagtaatggaagatccaattattaaagataacgaagctgcaaaagcagttgcaacgcaatctgaaaatggaattccaatgccaaacattccagaaatgcaagaagtttggaaaccagctggagatgcgcttcaattagttgttacagataaagaggcaccaaaagcggcgcttgatagtgcagtgaaacaaattaaaggtaatattgaggcaaatcataacaagaaaaaataaggtgaaattcgtgcctctaatatgagaggcacgaattctctcccttccatgtaggaagaaaaaagggggaaggaacatgcaaacatctatggaaccagcaaatgggttaaaccattcaaagcataggaaaatggcaaccatgttatcaatcattccaggcgtgggccaaatgtataataaacaatttgtaaaaggtcttatttttctagtattaacaggttcttttattgtagcctttgctgatttattaaatatgggattatggggtattgtaacgcttggtacagaagttccacgtgaccattctgtctttctattagtagaaggaatcttggcccttatcgttatcgcttttgggctaggcatatatgcatttaacttatatgatgcataccaaaatggaaagaaacgtgatagcggaacaccgttaaattctgtaaaagagcaatatcgtaatttgttagatcaaggttttccttatttaatggtttcaccaggttttctactacttatctttgttgtcgtatttccaatcatcttcgtaattttaattggatttacaaactatgatttatatcattctcctccagctaaattagtagattgggtgggctttaaaaactttattgatattttcactttaccgatgtggagagagacatttgtaagtgtattctcttggactatcatttggacattcgttgcaacaacattacaagttgcacttggtattttcttagcgattatcgtaaatcagcctggtattaaaggaaaggcgattattcgaacaatcttcattttaccgtgggcggttccagcattcgtatctattcttgttttctctggtatgtttaatgaaacattcggagcgattaacaatcaagtattagctttattcggaattgaaaagattgcttggatgacagatccattttgggcgaagattgctttaattatgattcaaacgtggcttgggttcccgtttatctttgcgatgacaacaggtatactgcaatcgattccgggagaattatatgaagcggctacagtagatggagcgacagcttggcaacagtttcgtaaaattacattgccacttgtgttatatgcaacagcaccaatattaattacgcaatatacgtttaactttaataactttagtatcatctatctatttaatggtggaggtcctgctgtagctggacaagacgcaggtggaacggatattttaatttcatggatttataagttaacgatgacttcagcgcagtacggaaaagcagcagctcttacaatgatattatcgttaattgttattacagttgcgttatggcaatttaagagaacaaaatcattccaagaagaggatatgatgtaaatgaatattaaaagacagaagatgttacgtctctcattaagttatttagttattttcgtaatgtgtgccatcattttctatccgttattatggattatgggctcatcgtttaatccaggtgatagtttatctggatcaagtattattccacaaaatgcaacgttagatcattatcgtaagttattagatctagagaatagtaattacttactatggtataaaaacacattaaaagtaagtgttttaacgatgattttctcagtgttagcaattagttttaccgcttatgcattttcgagatatcgttttgttggaagaaaaaatggtttattaacatttttaattctgcaaatgattccaaactttgcagcgttaattgctttatacgtattagctcaattaacaggattaattgatacacaccttgcattaattttaatttatgtaggcggggctattccgatgaatacatggcttatgaaagggtattttgatacgattccgaaagaactggatgaatcagctcgaatggatggagcaggacattttcgtattttttggcaaatcattatgccacttgcaaagccaatcgtagcggttgtagcgttatttactttcattggtccatttacagatttcattttagcgagtattattttgcgaacaccagaaaattatactttagcagttggattatatgaaatggttgcgaagaaattcggtaatgaatttacaacgtttgcagcgggttctgtgttaattgcgatcccaatttcaattttattcctatcactacaaaaatactttatttctggtttaacagctggaggtacaaaaggatgaaaaatgggacattacgtcccatttttcttttcatctccctataaataagtttatagggagatgaaaagagatttgacatcacatgtgaaaagaagtgaaataaatagtatattatagtataggaaaaaatagctatatcccttacaatacatgaagagggagaataggattagttttgcaagatataagaaatgaaagtttatgacttgcaatgagtgcgagataaaatatatgaaaaatggcagagaaatgagaggagggggatttttatgacagttacaattaaagatgtggcgaagcaagcgaatgttgcaccatcaacagtttctcgtgtaattgctgataatccaagtataagtgaaaagacaaagcgccgtgttaggaaagtgatgagtgaattagggtatcatcccaatttaaatgcgagaaatcttgcgaaccaaacgacgaaaacacttggtcttgttatgccaagttctgcaagtaaagcttttcaaaatccatttttcccagaagttataagagggattagttcatttgcacacgtagaaggttatgcgctttacatgtcgacaggtgaaacggaagaagaaatttttaatggtgtcgtaaagatggtacagggacgccaaattggtggcattattcttttatattcaagggagaatgatcggattattcaatatttacatgaacaaaatttcccgtttgttttaataggaaaaccatatgatcgaaaagatgaaattacatatgtagataatgacaattatacagctgcaagagaagtggcagaatatttaatttcattagggcataagcaaatcgcgttcattggtggtggatcagatttacttgtaacgagagatcgtttagccggtatgagtgatgccttgaaattagcagacattgtattaccaaaagaatatattttacattttgatttttcgagggaaagtggtcaacaagctgttgaggaattaatgggactgcagcaaccgccaacggcaattatggcaacggatgacttaattggacttggtgtgttaagtgctctttctaaaaaaggattcgttgtaccgaaagatgtttctattgtaagctttaataatgctttattatcagaaattgcgagccctccactttcgacagttgatgtgaatatttatcagctaggatatgaggcagcaaaagctttagttgataaagtagagaatgcagaatccactgcaaagtgtatcattattcctcataaattactaaaacgtcaaacttgtgatcattatgcataaaaaagctaagagtttaactcttagcttttttcattagaaaggcttctaatcggtcgcagccttcttttaaagtttcgatactatacgcataggacaagcgaaggtagccttcaccgtattcagagaatgctgttccaggaactacagctagtcccgcttctttgacaagatcaagtgcaaaatcaaatgatgaagatgtcaaatgaccaacatatgggaataagtaaaatgcacctgttggcttttcaactgttaatcccatttgagtgagtctattatatacgtaatcacggcgttttttatattggtggcgcatcatttttggtgcgtctttagctgctgttaatgcttcaattgcagcgtattgagcgattgaagtagcacacgttacattgtattgatgaacttttaatatgtgtcctgctaaataacttggtgcaaataaaagtccaacacgccagccagtcatagaatgtgatttagataaaccgttaatgacaattgttttttcacgcatttctgggaaatgagcgatagatgtatgcttttgttcatatacaagctcgctataaatttcatctgaaaggacgaaaatatttttatcttttaaaacatctacaatatcttttagctcttctgttgataaagttacaccggttgggttagaaggatacggtagtacgatacatcttgttttttctgtaatagcatttttaagcgcttcagctgttaaacgaaatccagtttcacgaacatctacaaaaataggcgttgcaccgcataatcgaataataggttcgtagcctggataaataggagcaggtaaaattacttctgttcctggctctaaaatcgttcggaatgcaacatcaattgcttcgctagcaccgattgtaacgatggtttcgttttcaggtgaataatgtaaatcgtagttatcttttacgaagttacaagctgccttacgtaattctagtaaaccagcgttatgtgtatagcttgtatagttttctgtaatagcccgtttagccgcttctttcacgagagaaggtgtagggaaatcgggttgtccaattgttaaagaaatcaaattatcatagttttgaatcatgttagagaactgacggattccagaaatttggatgtccttcactctagggttaatgaattgttccattgtatctccctttcttccgtttgaaaattaagttcattttatcatattttctatgattacgctttgtatatgttatttagaaagagagagaaaagagaaaaaaagccgctataagcgactttttaatatccgtattcccaatctatttcatcttcattccagagtacagaggataccttgccaaggtgaacgactgattcgtttacagcacatgtgcagttttcatctcccgctttatgctgtaactcttcatatactgatttttcaacattttctagaacaaccaaattttcttcttttaaaacaagcgtagtacccgccatatttatcttcctcctactaaagtaatgatcacttatttgtaaacatagatagtatggattatatgctgtattttgctataattgtccgtctaaaaaagtatttttatattttctttgtaatccgtattcattgtatactgcacgaaggaaatttggtacagggtttacaatcatttcgaaaatctgtaacaattattatgagttgttaacaaagaattaacaaatatgttaagaaaaatcaaaattttaaaacaaatacacctataaaatgatataatcatatcaaaatacatataggggatgagaggttatggagcttatccgtgatttattgattcaaattgccatcataattttgccactatttttatatgaagcgattcgtttaaatcgctatcaagaaatgcctccgaagccaaatcgttactttattatgtttttatctagcgttacgctcgttctctccatgacatactctatttgttttggcaatgtgtgtgggtataactttcaccccattccaattgtcagtggttttttatatggtgggattgttggtttaatcccagcggttatttttgttgcatatgaatggttactaaagggaatgagctttcttccagttttagaagtaatatttctattgatagttccgctatttttatcaaagaaatggtctcttttttcaagggataagaaattaattttagcatttatgatttcatcattttatgtgcttgtttctttagtattaggcatgattaatgttcttttggaaacaggatttacaccgtatatttcgcaaatatatagcggatttatatttgcctcgcttatcatggtcatgacaatggtatttcaggtgtatttaactgaatatttaaatgaaaatgcattgctacgtacagagatgcaaaaatcagaaaagcttaatattgtaagtgagttagcagcaagtgtggcacatgaagttcgaaatccactaactgttgttcgtggatttatccaattgctagaaagtacggaagatgtgaagaataaggattatatgcgtcttgtattagctgaattggatcgggcggaacaaattatttcagattacttaaatttagcaaggccgcaaattgagaaaaaagaacacatttgtttatcagcccaattaatagaaatgaccactcttatgtcgtcatttgcagcgatgcaaggtgtatatttacaagttgaaatttcagaaagtctttatacgattggtgataagacaaaattgaagcaagctattatgaatgttgttaaaaatggtattgaagcaattcaaggaaataaaggatatttaaaagtaacagctattcaaaaagatgaaacaatcataataagagttaaagatagtggtgttggtatgacgaaagaacagttagcaaggcttgggcaaccatattattctttaaaagaaaaagggacaggattaggacttatggtaacatttagtattttacaagcgcataatggtacattggaatataagagtgaaagtggaaaaggaactgaagcaattattatattaccagctgtacaaaataaggaataaaagttaccgatggaaggtaactttttattttatattgtttattcatttgttttttcttgtttttctcggctaaataaacttttaaatgattgaaagaagctttgctcttttgaggcagcaaccattctttttgtttcttgaatttctcgaataacttgcataagctgtgcatcacggttactgtctttgttataaatttgactaacaagtttattcattttttcttcctgtttggattctcgtttatacatatgattcattaataagtccatcttttctttttgcaatgcatctgtttgaacggcgtgatcgactaactcttgaagcattttttcttgagagccttcttttacataaacttgttgcatcaattcgtctagtttctcatcctttaaacgattttgtgtaattagagtagaattttgatgaataattgcctcatttaattgagctagcatttcaagttttaacatgaactcctcaaagttacgcccatcttctttttctttcgtttgtatctcttgcttatcttgtataactggtacaggtggggcctctttttcttttaaaataatcggtatcgtttctgaaatatcttcttgtaatgtagcagctctttcgtgtatagatttcaataattttaaatcatcaagtttataaatacgagcatcagctgttttggaaatcatataaccatgttcctctaacagttgactatatttgcgaactatatgttttgggatgcctgttttattcgtgacatctttcgttttataggtagcttccatcatatttcctccccaaaaagtatcgtatatatcatttcaatcttttatgaggacttcctttgaaaaagaatgtcggaaggctattagttttctacagcattagtgaaaaaatgaaaatttttggcggaatggcaaggaataactaaaataatgtctgaaaacatatacaggagaagtttgttataataacggaggaaaagaaactggtagaaacatggaggtatacatgaagcaattaaaaggtattatcatttcaattatcgcaattctgtctattttagtagcagtttatgaagtacttgtgccagaggaaacaagtgtaaagaaaacgaatacgtatgatcaagtgttagaatttccgaaagaacgttatccagagacaggaaaacatattacggatgctataaaagaagggcattcagaagtttgtacaatcgatcgtggtggtgctgcagatagaaggaaattgtcgttagcaccatatccatcaaaaaaagggtatgatcgtgatgaatggccaatggcgatgtgcaaggaaggcggaaaaggagcacatattgaatatataagtccggcggataaccgtggagcaggctcttgggtagggaataagttagataaatacccagatggtacgcgagtaaaatttgaagtgaagtagtagttgtatatttcataatgaaggagaaggggaactatggagttaacgatttcttattcgcaattaatgttgatgaactatgacggtgagcagccttatgtagattggactgatgaagattttgaaagaggttatgctaaggcagatggaactgttatttttgaagcactttctgattatacttgtgaagtgaaagtgaccccagggaaacatattgaaaaagaagaagtagttagaacgattacggttccttttacagttgaaaatgaaagtatcgttataacgagtattctttctaataaatttcaaatacctattccaaatggtgagtatacagttgtattacaagcaattcctcttgaagagccaacggatgatgaattatataaaatacaatatgaattcttttttgaaagtaaagaataaaaaatgggttatcctgagaaaaggataacccatttttgttatgcgtttgtttttaaaagggaacgagcatctttcgctgcttgcaccatatgttctaaagctggaataacttcttctgttcttctcgtttttaaaccacaatcgggattaatccagaaatatttaggatcacatacttctaaagattgttctacgattttatacatttcatctttactcggtacacgtgggctatgaatatcatatacacctaggccaatgcctttttcatatgttgtatgttttaatgtatcaataaattctccgtgacttcttgatgtttcgatagaaattacatctgcatctaatgcgcgaatcgcgtcaacaatatcttcgaagttactgtaacacatatgagtatgaatttgtgtttcatttgctacagaagaagttgctaaaaggaaggattgtactgcccatgtaatataagcatcccaatctttttcttttagtggcattccttcacgaagtgcgggctcatcgacttggattactctaattccagaagattcaagtagttcaatttcgtgacgaagagctagtgcaatttgatacgaaacttcttttcttggaatatcatttcgaacgaaagaccaatttaaaattgtaacaggtccggttaacattccttttacaactttctctgttaagctttgtgcataaactgtttccttaatagtcatgccgttaataaaggctacatcaccataaataacaggtggttttacgcagcgggaaccgtatgattgtacccaaccgtttttagtgaatgagaaaccagcaaggcgctcaccaaaatattcgaccatgtcagttctttcaaattcaccatgtacaagtacatcaagcccaatttcttcttggtaacgaatccatttttctgtctctttttcaataaattgttcatattggtcatttgaaataacaccgttacgccattcttttcgcgtttgacgaacttcagttgtttgcgggaagctaccaatagtcgttgttggtaatagcggtaactctagagcaacttgttgtaattcgtatcgtttttcaaatggaagagaacgtgaaaaatcttcttcttttagtgctgttcgtgctgctttgacatcttctcggttacgtgcagcagatgaacgaattgtatgatgtacgtttcgatatgtttccagctcattactaatgctttctgtaccttgagtgagagcggaatgaataagaactaactcttctaatttttgatttgcaaatgctaacgcatcaaacagctcagtcgataagtgagtttcttctgttttatcgattggtgtatgcaataagctacaagaaggctgaacgatgatatctttcgtttggacttgtttttgtaacgttgtaaataactcaagaacttcatcaaggtcagctctccaaatgttacggccatctatacaaccgacagctaaagttttatcagctgggaatccatattttgaaatagcatttagattaccttctttaccatgaatgaaatctaatccaataccggataccgggaatgtaataatttcttcatagttttcttctacgctatcaaaatatgtttgtaaaagaagagtcgcatttggaacttctttacgaatagcttcataaatttcttttgcttgttgaacttcttttttagttaaagaagcgaaaatcggttcatcaacttgaatggcttgtgccccagctgcatgtagttctgaaagcagttgtacataaggtgcaactaactgttttaaaatgttaggaaattgttcttgtgtatagcctttagctaattttaagaaagtatatggtcctaaaataacaggctttccatctactcctaattcttgttttgcctcttcgtataagcgaagtgggcgattatcttttaaagagatttgtaatccctcttcatattcaggaacgatatagtgatagtttgtgttaaaccattttgtcatttcggaagctacgtgatctttagagccacgcgccattgcgaaatatacatcaaggtaagatgtaaactcagaaaaacgtgatggaataaatcctagcatataggcagtatccaaaacgtgatcataatatgtaaagtcgccaattggaatgagttcaatccctttttcttgctgtacttttacgtgttgaaggcgaatttctttcattgttgttaaaaattgttcttcatcgattttattggaccaaaaagcttccaatgtttttttccactctcgttgtagtccgatacgtggataacctaagttacttgtttgaattgccattttaaattcctccctaattgaaagtaagcatttccgtttactaggaaatacctataacaaaaagtacaaagacatagaaaataagccttcctttttgttttaacacctcatcatcatccgtgaatctatcagtgttgttaaaacaggcaggtctcctgacttatgcttcatataatttctttcaccttcccgttttcacagtggcaccaaaaagaaatctcagcatttacagtggcgggaccgtgttggagtttcaccaagcttcccttttaaacacgaaacgaaactttcgtgtacctattttccttttgaaaggaatttaacaagcgatatgatattgaaacaaattctaacacaatttttggaattttgtctactgttttgaaataagaaaattcaaaagtttttatttcttattattatgacttttcatcctggattaactaataatattacagtataaaaagagaaattgagctatgaaagaagtagggatgccttctttcatagctcaattttcatctatagcaacttctgaaagtcggcctgctatagcatctttaaggagggtgtttagccattgtaactcaactgtaatatgctcaattacactttgcaaaatatatagttgtgcacgtggaacctttcctttattacaatcatatatcgtttgcatagtatgtaaatattgaagagtatcgtttttctttttttctaaaataggaactaattcgtgatcattgctaaagtgagcgaaagataaggccgaataaataggtttatatatttggtttttggcttcgaattgttttaatagtaaagtgtggaatagttttttgccttcttctgttatatgaaaaatcgttttgtcaggtcgatttgtgtctctaattacatttgtaatatgaattgcgccttgcttttctaattgctcgaaggcgtaataaagtgatcctttagcatatttaatataacaatccatttgtcgttctttcataatatgctgcacttcatatggatgtttatctccttcgagtagcaagccgagaatgactaatttcatgctcatgctgtctcaactcctgtatataaaaactttatccagtaagatccccacccaaaaattcagcggaagcaaagaagttaggtggggattaactgcccgtaaaagcccgattggtgagggctaataatcagtgggggatgaacaccccccccactgattaaagtttcactttatacatattataaacggcatatcctttttcataaaggaatatgccgcttcttttttatattaactaacttgcttttgtttttctttctttttagggcctgtaaagaggcgttcatttcccataagtaaaatacaaataatacttagtacagccgggatgagtgcccagaagaatgtattcgcaatagatgtagcgagagcttctttaatacccgctaatatttcagcaggaatttttgcggtagcgcctggtgataataagaaacttgtgtctccgccttttggagctaattttgctagttcagggggaaatacagagtttagtttatctgtaaaaatatgattttgaattgtaccgaaaatcgttacaccaagagtcataccgagtgatcggaagaatgagtttgttgatgtcgccgaaccacggtcccgcatttccaacttgtgaatagaagacatacttaatactgagaatgagaaaccaacaccaagcccagcgagaatcataaatagtgttacgagtaaacgaggtgtgtccattgttaaagtacttaataaataaataccaagaacgaagaagaaaccagataccatcataatgttacgatagcttgttcgagacgctaattgtcctccggtttgacttccaattacagaaccaaccatcattggtgttaaaattaatccagcattagaggcggaacctccaagaacgccttgaatgaagattggaatataaactgtacagataataaaagcggcaccatagaaaaaggcaactccttgactagctgcgaataaaggttttttaaatagatggaacgaaataataggctcggttgcttttcgttctacaaagaagaaaataataagcgtaataactactgttgtaaataagccaataattacagtagaattccaggcatattctttaccaccaagttctaatgcgaacattaagcaaacgatacttatgacaagtgtaatagcaccagcccaatcaattttttgttttctaaattctagagactcactgtagtatttagtaatgaagaaaaaggagataagtcctaatggaatattaatatagaagacccaatgccaacttatatagtctgtaatataagcacctaataaaggaccgaatacactagatgtcccgaaaacagcaccgaatagtcctgtcatctttccgcgtttttctggtgggaagatatcgtacataattgtgaaggcgataggcataagggcaccaccaccgataccttgaatagctctataaatacttaattgctcaatacttgaagctgttccgcagagcgcagaaccgaataagaaaagaatgaggccacctatataaaaacgtttccgtccgtacatatcagaaagtttcccgaagataggcatccctgccattgttgctaccatataagctgatgtgacccaaacaaacttatcaaatcctcctaggtctccaacgattgttgccattgcggttgcaacgattgtattatccattgcggccattaatataccaagcagtaaaccagcaacaacaaattttgttttgttggcgtctttttttaatggttgagtttccaaatataaccctcctttagaaataagtaaactatattaagttttgagtgcagtggataaaaaattttaaatgtatagttgattttaattccttttccataagtgcactgatatgccataaagaatattatagtcaaatttgactataaggcaaactttttcttccgtcaaaatattctttcgtatgagtagagaacgagtgagccatactgaatattgctataaaggaaatgaagtaaattgtaaaaaaatttcataaagaacaccttctgttaatagatgaaaaatggttttttcttcatattgtcgaataggataaaaggaagagaaatattaaacattgcttgtagcaagctttagtgatttggggaattcattgtgtgtatgttacatctgaaatgaggtgaatatatattatgaaaatatggggacgaatttcggatacaggaaagtattcaataccgctacaaccagtattgtggattgacggatcgaaaaaggaaaacgaatttcctcaagtagccgttacattacaaattggtagtatgtatacagaacagttttcgtatgaattgacctacgatgtaaacgacatacttattatgcgaattgaagtggaaaataaaggggtagaaatgatttcgagagttgttgtaagtcatatgattcgagattactttgcttatattcctaattctttaaaagttgataaggggataagtgagtttttattccagcttgttagatggcgaattgatgatttgttaccgaatgagaaggtggaactacgttgtaaaataaaagctaataaagataaagctcttaaacaaacattctttcaggctacatatacatttcaagataaagagatatcatatggcccactgcaaacaaatgaagttgttgtgcgtcaatgataaaaaggaacctgtacaaaaggttccttttttagtgaaggttgtgttttttgagtattttcttttgctccattcctttttttcctacatagttatttttgtagccaaagtatagaataaataaaaatgaaacaacattaacaatagcgtcgatttgatcgtttgtaataaagtgtatcccgaaagaggtaaataataattttaatgataatagaaaaccagctagtaaacgcatagcatctgatagattctctttttgtagcatatagattactcctttctataaaagttatatattatatatatgaaatagagtagaaaaggtatacaagcttaagcagaaatgtacattgcatatgtacattttttattttgtagaaaaacattattgatatagaaacatatattggtataaaagggggaaaagtatgaaacataaagggaaaattagtggattattgcttggcaatactgtggcagttacagaatggattgcacttcaggatgtaattgcaaaactggattcacgatcattttataccgtctttattatttatatattgcaaatgatactaagttattattttggacattggtacgataaaagagcgaacgagcgtatgggtatggaagtaggaggaatggcaagcaatgattttgttgttgatttttttgggaaagtagctgctttatctgaaagagattctcgtaatattacagtgtacattctttctgtaaaagaatgggaaggattaaaagacacgttgcaagaaaaaaagttgggagtgttagtacaaaaattagagagtaccattgtaaaaacaattcggaagggcgatgttgttacaaagtgggatgaaaataagtacgttattgtagcaattgataatggccatgaaacatcaacaataacaaaacgattaatgaaaaatattgaaagtgaaatagaaggtgatttactcagtgtcactcttttatttggagcagctagctatccagtagaaggaaaaacgtttgaagaactgttgagaaagtcgcaaaatcaattgtaccagtatagaaatttgcaagaaaatgagtgaagctttgatttgaagatatatgataggaagatgttttatttgtaacatttttttgacttttattacaaaaaaacgccacgtttgtaataaaagtctttaaaaatatatgaaataagcatataattatgatggtagtgtcaatgcaatttgcacagtgtgttttattttaaaagtgtagaggaaagcaagctctacacttttcctttttaggaaatgaaaagaatatttgtaagttgttgcgagatatcgattgtactgtgtaaaatgaacaaagagattaattgatagaaagctggaaagggaatgatagacgtgagagcggagcgatcaccttttatcaggtgaactattatagtcttattaagactgaggtgaaattccgtggacattaaagtaatacatagtgtgaacaggccttaaaaaacacgaagtagtatacttaaagatggatatggaattgctaaataattcaaaaagaataatgtaatatcaagtaataatttgtacaaacaatattaatgatcttcgtaaaaaagatgcgagtgtatagaacaattacatattttataacttttttatattacacgatggtcgtttataagtaggaggaagagatgttgaaatatagtaaattagcaattgtaactgcattatcaatgattttattagccggttgtttcggtccgaaaccagaagaagaattatatgtagcgtttgaaaacgctgctaaacaagaaaaaacaatgtttgaagatgcaaaaaaacttgagactttagagaaagaaggacaagaattatataaccagattgttcaagaaggaaaagataataatcaaactgttaaagaaaaactgaatcaagcagtgaaaaatacaactgaacgagaaaaagtgcttgcaaaagaaaaagaagttttaaataaagcgcaagaagaagtgaagtcagctgataagtatgtgaagaaaattgaagataagaaattgaaagatcaagctgataaagtgaaaagcacgtatgagaaacgacacgattcatttaataaaatgtatgacagctatgacaaatctttaaaacaagaaaaagagttatatacaatgttacaagataaaggtactaaattaaaagatattagtgaaaaagtaaaagtagtaaatcaatcttataaggatattgagtcagaaaaagataaatttaatgaattcacaaagtcttataatacagaaaaagtagctttttataaacaagcaaatattaaaattaaagaagagaaaaaataaaacagtttggcctacacttggccaaactgttttatttttttgtataagtacgactataccatggaacaggttcacttaattttttttcttgttttaatgcttcaggaccaatataatcttgaattgttttttttgccactgttaaagataaggttgttttcggatttcgataggaggattcaagatgaccaagatgcggtagaattcgaaaatcttctttcgtaggagggatgtggaaaaaataatcgcctaaacgtataaggacatcagattgttgttggctaaaacgtgggtttctagaaaaatgtaatccttctttaattgcttttttttcagcaatcaaacgttctaaagctgtcttttttaaccagtataaatatttaggattagtagctgctttagcatgacgattcacaacgaaaatagattgagctagtcgattaatagaatgttggttttgtaattgagattgtggttgtgaaggtttcatattgaatctcctttcaatttttcattattataccataaataaaataggtatttattatacgcaaaaagtgattgtatatattttcaatattaaagcaatattgttacaaaaaacaactattttgtataatagtaatagaatatgttttttaaatttgataatgaaagagtgagaagtttgaaagaaatattaaaacaacagtatgccattatagatattggatctaatacaatgcgtttagttatttatgaaaagcaaaatggaggtttttataaagagattgaaaatacgaaagttgttgctaggttaaggaattacttaattgatggtgtgttgaatgaagagggaatagaagtattattacagacattatttcaatttcaagaaagtacaagattccatcagttgcatcatgtactttgtgttgcaacagcaacaattagacagtcggagaatcaagaggaaattaaaaagcttgttgaaggacaaacggactttactcttagagtattatcagagtatgaggaagcgcgttacggatacttggcggttatgaattctacatcgttttcagaaggaataacggtagatatcggcgggggaagtacagaagttacatactttagaaatagagagattttagagtaccatagttttccatttggggcactttctttaaagcaacaatttattaaaggggatattcctactaaagatgagttagagggaatgcaacagtatttagagtttcaatttcgaacgttaccatggttaatcaataagaaattacctcttattgcaattggtggtagtgctaggaacttagtgaaaatccatcaaaatttaatatgttatcctatagcaggattacatttatacaagatgaaagaagaagatattgaaagtgtaaaagatgaattggaaaaattgtcgttcatagaacttcagaaattggaaggattggcaaaagatcgagcagatacgattattccagcggttgaagtatttcatacacttgttaatgttatagaggcaccggcatttgtattaagtagaaaagggttaagagaaggtgttttctatgaagagttgacaaaagatttggggatttcatattatccgaacgtagttgaagaaagtctgcatttactatcacatgaatacgaaatggacatggaatttgttattcagcttattaaacatggaagactaatttgcaaacaacttgaggaaatagggcttatttctatgtcagtaaaagactgggaagtgttccatcaagcagcgaaagtatttaatataggcaaatatatagacgaagaagcaagccgtttacatacgttttatttattagcgaataagacaattgatggcatgatgcataaagatcgagtaaggctagcgcttattgcatcgtataaatcaaaaatgttatttaaacaacatttatctccatttgaaggttggtttgataaaagcgaacaaaaaaaaatacgcctgttaggagctgttttacaattttcagctactttaaatgtaaggcaacgatcgcttattgataccatatctataacagaaaacgaagaaggattaacatttaaagctttatgtgaaaaatcggcattagcggaaaaagtgcaggctgaaaaacaaaaaaaacagttagaaagagtattaaaaacgaatattaacttgttatttgaactaaaacattaggttgtacggatgtctttacaaaaaatttacactttataatattgtaatttgctaaaataaaagtaactaaattatagtaaaaaagtttcaaggggaagtgtgaagagaatggaattattgaaggggaatgcagtaaatttaaatgatacagcttattacaataatcgagagttaagttggttagcatttaatgaacgtgtcttacaagaagcgcaagatgcaaataatccacttttggaaagattgaaatttattagtatttttagttcgaatttagatgaattttttatggtacgtgtagcgggattaaaggatcaagtgagtgctggatttaatcagccagaaaataaagctggcttaacaccaaaaaagcaattaaataaaattgcgatgaaagcccatgcactaatgacagtacaatatgatacatttaaaaattatgtattaccagcgcttgagttagagggaattgaacgtttaacattcaatgatttgacgaaagagcagcgagaatttatagaagagtattttgatgagcaaatttttccggtgttaactcctgtagctatagatgcatatcgcccatttccaatgttattaaacaaaagtttgaatttggctactcttttatatgatgagaagcaagcggaagaggaaaacaggacgaagttaggaattgtgcaagttccttcattacttgagcgcttcataattttaccgagcgaagggcaaaagcataaatttattttattagaagacgtaattagtagctttactcataaattatttacgggatatacagtatcatctgttactcgtttccgtattacacgcaatgcagatttaacgattcatgaagaaggtgcgagagatttattaaaggtaattgaaaaagaattaaaaaagcgtaagtggggggctgctgttcgtttagaagttgggaaagaacacattgatgaaagagtactagcgttattatatgaggttctggaagtaaaagatgaagatgtatatataatggatggtccattagatttaacatgtttgttttctttatataaaaaactagctcctttatatgaacatcttgtatatccggctcttattccgcaaccacctcaagatttaggtgatgaagaagatgtatttgaaaaagcaattgagcatgatattttattacatcatccttttgaatcatttcagccggtagttgattttgtccgtgatgcggcggacgatccgaatgtacttgcgattaaacaaacgttatatcgtgtaagtggtgattcaccgattattcaggcgttaaagatagcggctgaaaagggaaaacaagtgacagtattagttgaattaaaggcaagatttgatgaagaaaacaatgttcattgggctaaagaattggaacaggcaggctgtcatgttatttacggtgtaagtcacttgaaaacacatagtaaaattacattagttgtaagaagaaaaaacggaaaaatcgaaaggttcgtacatctcggaactggaaactataatgatgcaacagcgaagttatatactgattttggatatattacatcaagaaaagactttggggttgatgcaaccaatttctttaattatttaagtggttatacaacaaagccacattttcatcatttatcggttgctccatttgatataagagagcaatttatagatttaatagatgaagaaatccgttatcataggcaatatggaaatggatatattatcgctaagatgaattcattaacagataaaccattaattaaaaaaatgtacgaagcatcacaagctggagtaaaggtagagcttattgttcgagggacatgttgtttaagacctggcattccaaatgtaagtgaaaatattcgtgtagttagtgttgttggaagatacttagagcatagccgtatttattatttccatcataatggggaggagaaaatatatttatcttcagctgatttgatgacgcgaaatatggagaagcgagtggaaatatctttcccgatattagatattgaaatgaaggcacgaattaaggcgattttacagcttacattagctgataatgtgaaaacacgtgaacaaaataaagatggtgattactattatgttattaatagtagtacagaagaaattgatagccaagtgaagttgtttaagatggcatatcaaaatacagacgctgaataatgaaaaaagtaaaaacctcttatgtcaataagaggtttttacttttttctactcatatgctccaaaaatggaagaatgagtagaaacaatagttttattataagcgtgtaatgagatggctcgttgagagaataatatttgaaagaatcgttattttaacttagtaatagtatggttgctgacatggtccaccgtaacaaggataaggtgctggcggcgggaaaggtggtggataaggtggataaaatggtcgagggccgaaagctaatgctccgccgagcaatccaccagcaattccagctagaaagggaacgccaaaaaacgggaagaagcgtgagtcgcctactggaccaataggtgctgaacggactggaattggttgataatatggatacatgaacatacctcctttattggactcacttttatcatatggtaaacaaaacgtggatgagcgcgtacaagaaaggatatgtaagaaaataggcgaattattacgaatgttggagtgtgaaaattgtgatttcaggttttgacataaagcgaaatgggacacgtgttcttcccaggcctcgattgacatagagagttaaatcctgaattgtatagaagccttcaatatagtctttggcgagtgaaggtgtaataatagctcctaaaaaaggaatttgtacttgtccgccgtgactatgaccagaaagttgcaagttgattggatatttagaaacttggggcgcgatatctggttcgtgaacaagaacaatgttataagtactttgccgtgcatgctctaatgttttctctatttttggtttgcctaatagtatatcatcgagaccgaaaatagaaatttcactattatccattagacgaattcttttttcactattgagcaatagctcaaatcctgattcacgcatgatgtgctcatagtattcagttccatatccaccgtgatcatggttaccataaatagcgaatttaccaaagggggcttgtatattttttaaaatggatgcaacgaaaggagtgtcagtatacgtttgataattatcaatgagatctccggtaaaaaggacaatatctggatttacagcattaattttagaaacaactttagataaatgttgaagcgagaaatagtatccgagatgtaaatcgctgaattgaagaattttcataccatgaaaactttttgggatgagttgtgattttaatgtgtgctgtgtaaaagaaatgaaatggggctctatatatttagcatagtagtatccgatgctactggttataaatgaatagagacaagtgcgcataccaatttttaaaaaatttcttcttgtaatgtgcttcataaaaatatgagtatacctcaatgttttcattccatttataggctactcaaatctcctttcagtttatttaaaatatactttacataataaaaagtagtatagattacgaaaaaaatgaataaaaagaaagttctttacgttaaaatatcagaaaagtttaaaaatataaagatttctattaaataaagtgataaaatgaatgtgtattcattttttggaggggatgtatgtgaaagaaaaggtagttattataacaggtggatcgagtggaatgggaaaaggaatggcgactcgttttgcaaaagaaggggcacgagttgttattacaggacgtacaaaggaaaaactagaggaaacaaagttggaaattgaacaatttccagggcaagtattacctgtacaaatggatgtaagaaatacggatgacattcagaaaatgattgaacagattgatgagaagtttggtagaattgatgttttaataaataatgcagctggaaactttatttgtccagcagaagatttatctgtgaatggctggaattcagtcattaatattgtattaaacggtacattttactgtagccatgctgtcggaaaatattggattgaaaaaggtataaaagggaatatcattaacatggtagcaacatatgcatgggatgctggtccaggagttattcattcggctgcagcgaaggcaggagtattagcgatgacgaagacgctcgctgttgagtggggacgtaaatatggaatacgagttaacgctatcgcgccaggaccaattgaacgtacgggcggtgctgataaattatggatttcagaagaaatggctaaacggacgatacaaagtgttccgcttggaaggctgggtacgccagaagaaatcgctggtctagcttattatttatgttcagatgaagctgcgtacataaatggaacttgcatgacaatggatggaggacaacatttacatcaatatccattttaaaagggataaaaaatgaatgtttgattcatttttttatggttaaatgtgacggaattgtgacatatgaaagaaaagtgtttacaagaggtcatatatacgttatatttaagacctcttttttcttcatagtagaattgctaattccccttagcattttacccctctaatcccttcaggaaaactgaagggattttttattatttttccgtaaatatcatgttataatttttgaaaagtaaagggagggaagcacgttgatagatgcattagatgtaatgagtaacttggataaagtccttccttattatcaagctatttttagtgctgatgagcatactgtaattggatacgaagtagtaggacgtattcaaacagaagagggcatacaaagtttagcttctttctttcacgatgattcgattccaagtgaatttcaactggaagcggataatattatagtagaaaaagctttaaatcgttatttagaaagcgatcaaaaattattattatttatacatcggaatgctaatgtattaatgaatgatgatgatgaaagcttgcttcaacttttattgaggtatgaagaacaaggtttaaatttaaaacaaattgttttagagattacagagcatgaatgtaaagaagatatagagcaatttaatcatttgcttatgtattatcgtacatatggtattcaaatttcgattaataaagtcggaacgggcacaagtaatttagagcgtattagcgtgttagcacctgatattttaaaagtagatttaacgaacttaaggcaaacagcacttttacaatcttatcaagatattttatattctttatcattacttgctagaagaattggtgcaactttgttatatgaagaaatagatgctttttatcaactgcaatatgcttggaagaacggcggaagatattatcaaggtaattatttgaaagaatgtttacctgattttattgaaacgaatgttttgaaagagcgactaggtaatgaatgtcatcagtttattcagcatgaaaagaagaagttacaaaaaatttataatttaacagagatgttacgcgatcgcattggcgatgttttatcaaaacaaaaaaagaatgaagatataaatgattggttattacaatttagtcaaagtgtatcacagtgtagttttcgtatatttatttgtaatgaagatggtttccaacaatcaggaaatgttatgaaaaaagatggagaatggattgtgatgccggattattatatgaagaactggagttggcgcccgtattttctcgagaatatcatgaaaatgcgttttgagaataaggcgaggctttcagatttatatgcagatattgaaacgggagaaatggtacgaacattttctttcccgattgatgatgacaactttttatttatagatttatcttatgaatatttatatgaagaagatgttttattttaatgcacgaagagattcgtgcattttttgtttgtttttatcataaattggtaatagtgaaaatggtgatgaaaatgctgtctatcgttgtaaagattttacgaacgaaatctgtcctgtctttgcataatcattgttacaatgaatactacaaagacaagttcttttaaaaggaaggtgaaaaaatgaggaaatatggaatatggcttgttctatttgtatgtgttgcctttctagttggttatagtgttacgactgttttaggaaaagaggaagtggaagtcgatcggaaagaagtatttacaacgatacaaaaaggctatgaaacccagttttcaattcgtgggaagcatttgccgatgaataagatgatagagacgttatcaccgtattttacagataatttccttcaagtatttacagatgaaaatagcagaagtgataaacaaagtggtgaatatttacttccggcaaaagaagcaccgttttcttttaattcagaaacgaaaatgtcgtatgatgaagaacataaaaatttatatgtatatgagcggacaaaaagtggacagtatcaaattgtaacattgaaaagggatcaagataaatggaagctagcaggatatcatgaaagtcaggaacttttaactgaaataaaaaggttgcaacaattataaagtgaaacttttaatcagtgggagggattactcttccatctaacttctttgctgtagctaaatttggggtaggagttttactacccacaaatagcgggataagaataggaataggtatttacctattcctattctatattgagtagttgttgtaacttttcaatttgaaaccctgcaactacttcgccatcaattacgactgttggagttgaataagaatcatagtcgtataaaagacgattgcgagcagcagcgtctttttttacgtcaaattcttcatatgcaacgttattatgcttcaaaaattctttcacaataacacagggcggacaatcgggttgtgtataaacctcaatttttttcattgttattcctccttttttctgttttttattatattcttccagtataaaaaccgcaataaagaaggggaaatatgttctttctgttttttccttcgcatttcgacaaatttttagttgagtttctggccaataacctttatcctagagtgtggaacattttttctgttatgacggatagaatgagtatagctgtaaaacctattggtaggaagatcagagaaaggagagatttcatgtctctactccaaggaattttaactcgacttgttagtctacaagaacaagctgaaagcggtgaagtagcacaacgctattttgaagtgaacggtgagcgcaaatgtagcgtgaaatttttcgataaaagtgaaatgtatgagttagaagtgtatcaacaaggtgaaaaacctcaagtgtatcaattcgataatatcgacatggttgcaattgagatttacgatatcatttcttgatacatataaaaaaggtactgccatgtggcagtaccttttttagttctattactttctagtggaatgtatagaagttttttatttttcctacaatggtattaaaatgaaattttaatccgtgcaagtttgcttatccatgtggaaaatgagtcccgtcaaccgggtgaatatgtgaagctaaacttctcacaatcgctgggttctgcaaatagcgggagaaatataactaggaggttatcgtatggaacgtttaccagttgtgatttgtcctaattgtcaaagttctgctgagattattcatgtattaacggctcaatctaatcaaaatgtaatttatacgtgccaagtttgtcactttgtaattcgaaatattgaaacgaataaaggataggaagttataattttagtttttgtcccatacaatgagaatacgaaaagtctgtctaattgaaaggacgtgactctgtggacggtgcacataaattttacaatgtttcagagagacatttaaattttgatatggtctttaaccgtatttgtagtttcattgaaaaggatccgcgaaatttatatcgattatccattgggacagactcacaagcgcatcaaaaggatacgaggtttattacagcaatccatattcatcgtgttggaaaaggtgcctggggctgtttacaccatagatcagtaaaagataagccggcaaccttacgtgagaaaatatatttagaaacgcagtttagtcaagaaatcgcatgtctatttacgcctactcatatacaaacaatatgggagttattgcatccttatgctcaagatggggctggattcataatggaaattcatttagacattgggaatgatggtttaacaaaagaatttattttagatatgacagaaaaaattcgagcgatgggattaactgcaaaaattaagccagatgcttatgcggcgtttagctatgcaaatcgatatacgaaatgattttttttgtatgtatacgattgctacatatcttttaataaaaactgaatattacatctattaaataggttgaattttttatataataagagtaacgatgcgagtgtaaggagaggggtatatgcaaagggaagttgttttaacgaaggaagaagaaagtttactactagatattttatttcagcaaaattacgcaagtgaaattttagctgtggaacttacagatattgagaatggtttgaaacagacagatgtgatgcaatataaaaaaatcacaaggttattttacagattaaaaaataaagggtattaagcgctaccggaatggtagtcttttttttgtgctgtatgctaaaatagctgtgtgattgtatttttattgaaataaatttaggacaaaataataatatgaaaacgctgtcataaaatgtgaatagagttgtgaacataagcaggaaaaagggaaaatgggggatgtaatatgattagtattccgaaagacgaatttcaacaaattcttgtgaaggatttaatgatttcatcggaaaaagtagctcatgtccaaattggaaatagtttagaacatgctttactcgttcttgtgaaatctggatattcggcgatacctgtcttagatccaatgtataaactacatggtttgattagtactgccatgatattagatggtatgttaggattagaacgtattgagtttgaaagactcgatgatatgaaagtagagcaggtgatgaaagaagatatacctgttcttaaattagacgattcatttgcaaaagctttagaaatgacaattgatcatccttttatttgcgctgttaatgaagaaggctattttgaggggattttaacacgtcgggctattttaaaattgttgaataagaaagtaaggcaacataatcgataacgtaagaaaagtgacttcatagaaacgaagaagtcactttttttttcgtgcatatcacttgtgtatgtattatatttaaaaagacataaaacataaggaaagtttgcgctggacaattgtattttctgaatgaaagcattcgggtaaattaaggatgaaaagcttattgaaataaggtgtatggaagctaaggaaagagggagaaagttgcaaattgatgattttcaaatgatggttgtgttagctcaggaatcaaatatgagaaaagcggcggaacgtttatttgtttcccaacctgcgctgagtcaacgattacaatctatggagaaacaatggggaatgaagttttttattcgctcacaaaaaggattgacaattacacctgaaggggaaaaagttgcaaattatgctaaagaaatgttgcaaagggaagaagatataaaaagtgagctagctgttttcagaacggaaactcatggaacgttaaaaatagctgttgcatcagttattggtcaatattggctccctcctgttttgaaaaagtttgtgcataaatatccttctgtcaagatatcgctgtttactggatggagtagtgaagtgcaaaagcagttttatgaaggagacgttcatgttgctatactgaggggaacacaagaatataaaggtcagaagcaacaattatttgaagatgaactgtatttagttgataaagaaataaaagatatttcgatgttaaaagaaacaaataggccgttcattcaatttaaaagtgattcgacttattatggacaaatacaaaattggtggtatggtttattttctaatccgcctaagcgaacgattgtagttgaccaaattgaaacatgtaaacaacttgttttaaatggtataggttatgcccttttaccttctactgttttaaaggaagtacaggaaaatatgtataaaacacctgttcaactgacgagagaaacatggttgttaacaagtgactcggcaaggcagttgaagcaagtacaagcatttttagaaattatagaagaaattcaaagggaaaaataagattattatcttgctactcgctctttcgtttggtagagtaacattataaatggatttaggaggcaacaagaatgaaaatgatggacgctaacgaaattatttcgtttattcaaaaaagtgaaaagaaaactcctgtaaaggtatacataaaaggggatttaaaagaagtaacattccctgaaacagtacaagcatttgtgaataaaaagtcaggtgtattattcggagaatggtctgaaattaagacaattcttgatgagaataataagcacatcgttgactacgttgtagaaaacgatcgtcgtaattctgcaatcccgatgcttgatttaaaaggtattaaagctcgcatcgagccaggtgctattattcgtgaccatgttgaaattggtgacaacgctgtaattatgatgaatgcaacaattaacattggtgctgtaattggtgaaggttctatgatcgacatgaacgcagtacttggtggacgtgcaacagtcggtaaaaactgtcacgtaggtgcaggtgctgtacttgcaggtgttattgagccaccttctgcaaaaccagttatcgttgaagatgatgtagtaatcggtgcaaacgtggttgttttagagggtgttacagtagggaaaggtgcagtcgtagcagcaggagctgttgtaacagaagatgtgcctccatacacagttgttgcaggtactccagcacgtgtaattaaagaaattgatgagaagacaaaagcaaaaacagaaattaaacaagagcttcgtcaattaaacccagagaaataaaaagtaaaaaaagcgtaagagcgtaaatgggctcttacgctttttatagatagaggtgcaaaaatgacagtaagcaaatttatccaaattcgtagagatttacatagaattccagaaatcggatttaaggaatggaaaacacaacagtatattttagattatataggaacactttctcatgaatttgtggaagtgaagacatggaaaacgggtgtaatcgttaaagtaaatggaaaaaatcccgaaaaaataataggttatcgtgcagatatagacggtttaccaattacagaggaaactggatacgagtttgcttctattcatgaaggaatgatgcatgcatgtggccatgatgtacatacaacaatcggtttaggccttctaacgaaagctgtgagcgaaagaatagatgatgaccttgtatttctattccagccagcagaagaaggaccaggcggtgctcttcctatgttagaaagtgaagagttaaaagaatggaaaccaaatataattcttggtcttcatattgcaccagaatacgctgtggggacaattgcaacgaaagaaggactgttatttgccaatacttcagaattatatattgatttaaaagggaaaggtggccatgctgcctatccgcatactgcaaatgacatgattgttgcagcgagccaccttgttacacagcttcaatccgttattagtcgcaatgtgaatccacttgatagtgcagtaattacaatcgggaaaattacaggtggtacggttcaaaatattattgcagaaaaatctcgtttagaaggaacgattcgaacattatcagtggaatcaatgaagcgtgtgaaaagcagaattgagtcaattgttgcaggtatcgaagcttctttccagtgtgaggcgattatagattacggagcaatgtatcatcaagtatataaccatgaagagttaacgagagagtttatggaatttgtacataaacaaactgatatgaatgttattacatgtactgaggcaatgacgggtgaagattttggttatatgcttcgagaaatccctggatttatgttttggcttggagtaaattcagaatatggtttacatcatgcaaaattaaaaccagacgaagaagtgattgaaaaggcaatcacatttttaagccaatatgtaaagtggaaagggaatagaaaataaaacttccgctctcttgaaggttccaaaaaactttttgttctgaggtgtaagtaacgctcgtatagattgattttagacatttacatacaaatggaagaattaaagttaattgtactgttttaataatgagcagggggtttagccactgctcattattaattatttgactaacttatatatgtttacttttagtatgaaaagtgtgtaaaatcaatgtgaaacatagaaaaaagggtggggaattacgtgcaaattagcagtgcgattttatgtttcgtcttatatgcgtatgttattattgcggcggtttattttgggataagtttttatgcctatcgtctagtagataataatgaatatgacgaaacatacaaatgggtgaagagatatttatcacctgtactagaaattatgaatgggtttgtgctctttttatttattggattaattgctttctcaacgagtttagtagggaataaaactacgttatttgtattgggtatcattatttttatgttgttaggaataaggattggtaatacggtcttttgggatgaaagaaaagtagatggttggacgggaatgttaattccgtgcatgttagctgcaatcgtgacaaatatagagcatgaatattatcaattacatttttggcttattatcgttttaacaattctttctgttttgtatataagcacagtagtactaacatatattgcacatgaaaaaggagatgttaaaggcactcgtttctttagaggacgggcattattttggagtgtgccgacgatggcagttatcgcgcttattgcgatattagtaaatggatatcaattttctaattggcaactatttttagaaaattggtggatctttatcttttcgtttattgcttttttaggtgcaacgcattatttattccatcaacatcattacatatgggcgttgttatttgcattcacacagcttctatttgccttttttggtcaagaaacattattattcgtttttgaaacatttagttcttttggaaatatatttgtatttgctatgctacttgttggtatcgctttttacttgcaacaatatttttatatacaaaaacaaaaataagagctaatcatagtttttgtgacgcatataaagtgtgttacactgaaaataaatagtacttgaagttattggaggaattcttgtgggtgagaaagaaaaagaatttgctgtcattggacttggtcgctttggtggaagtatttgccgagaactagctcaattaggtatggaagtaatggcaatcgattcagatgaggataaaattaatgaatttgcaaatatagcttcgcatgctgtaattgcagattcaacagatgagatggtattaaaaagccttggtattcgaaattttgatcacgtagtcgttgctattggagataatttaaattcaagtattttaacgactttgattttgaaagagttgggtgtaaaaaatattactgtaaaagctcaaaatgattatcatgaaaaagtgttaagtaaaataggtgcagatcatattgtgcatccagaacgtgatatgggaaaaaggattgctaataatattgcatcaagcaatgtgctagactaccttgagctttcagatgagcatagtattgtagagattattgcgaataaaaaaattgatgggcactctttaattgaattagatattcgtgcgaagtttggattgaatattgtagcaattaaacgaggcaaagaagttatcgtatcccctcgagctacggagaatattcaagcaggagatatattaattgtcattggtcatgacgatgaagtggatcgatttaaacactttttaagataagagaaaagaaaaggacaatgccttcatggcattgtcctttttcttatatttccataatgattggtaaaatcattggacgacgtttcgttttctcatataggaatggggctaatgtgtctgtaatttcatttttaatttcagaccattgtgttgttttacgctccattactttttctaaatgagttgtaattaatgtttgtgcatcattgattaaatcgctgctttcacgcatgtaaacgaaaccgcgtgagatgatatcaggtcctgctgcaactttaaattctttcatatcaatgcttacaactacaattacaagtccttcttcagaaaggatacgacgatcgcgtaatacgatattgccaatatctccaataccgtttccatcaatgtagaccgaaccagatgggatttttccagctacgctagcttcatccgaacgtaaagcaagaacatcgccattatccataatgaagcaattttcttcagggatgccacaatcatttgctatgttcatgtgcatacgctgcatacgatattcaccatgaattggcatgaagtacttcggtttaattagacgtaacattaacttttgttcttcttgtccaccgtgtccacttgtatggatatttgaaagtttcccgtgaattacatcagcgccagcgcggtacaacatgttaattgtacgacttacgctaattgtatttcctggaattggtgaagaagagaaaacaactgtatctccaggaataatttgaatttggcggtgtgtaccatttgcaatacgtgaaagtgctgccatcggttcaccttgactacctgtacataaaataacaactttattagctggtaagcggtttagttgagatgcatctatgaatgtatctttcgggcaacgaatataaccaaggttttgtccaatttcaatcgctgcttccatacttcgaccaaacacagctactttacggttgttttcaacagcagcttcaacaacttgttgtaagcggtggatatttgatgcaaaggttgcgaatataatccgtccttctactttacggaaaatgtcttgaatgctatcaccaacgcgacgctcagacatagtaaagtttggaacttcactgttcgtactatcagataatagacatagtacgccatctttaccgatttcagccatttttgttaaatcagctggttcaccaactggtgtgaagtcaaatttgaagtcacctgtatgaacaacttgaccttgaggtgttttcacaacaacgccgtacgaatctggaatactgtgagttgtacggaagaaggatacagacgtttttttgaatttaataacgtcatcttcttgaatctcgtaaagttttgctttacgaagtaagccgtgttcttctaatttgtttttgatgagtgcaattgctaattttccgccgtaaatcggaatgttcacttgacgtaataggtaagggattccgccgatatgatcttcgtgaccatgtgtaatgaataaccctttaattttatcttcgtttcgcacaaaataagtgtagtctggtattacataatcgatcccgagaagttcgtcctctggaaatttaattccagcatcaattataataatttcatcttgaaattgaacagcgtatgtatttttaccgatttcaccaagcccaccgagagcaaatacagcaacttggtcgttttttagaaatttcatatcgctatacgatttccgctaatgttaaatcagcgttttctttttcatattcaagatgagcgccagtaacagactgaacaaactcgatattatatgcgaacttatttaactttgtacgaacatccttttcagacgtagcctctaaatataaaacttttgtattttcacgtactggaacctcagttaatttttcttgataaaatactttaaaaatcatttggaaaacctctccttgtctatgttttgcattatctgttacttattataaagcaaacagtcacgattttcatgttttttcgaatgagaatgaagaaaaagcccgaaatgggcacaatttaagcgattgtctttttacggactagaccgtttaaataacgcttgagctttttcttcagcttcttcagcatgattactccttcctttccttattttaaacatgcctattactagtgaaaactctatctctgatataagagataggacaaaagtgaatggtgaatcttgtcctttcccatacagtgaaagttattctatagtaacgatcagtagccgttagttataggtatagtatgaggaagaatggaaaagaaaattcatccgaacaagtatctacatgttttactaatatatatatgcaaagtttacaaataaggtcagaaagggaacgctttcttcacagatgtttaatatgttatacttttttttagaatttgaaaagtgatattcaaaataggaatatagagtcccagaaaggattttgacaaatgaatgataaaattgtcttttttgatattgatggaacattattagatcatgataaaaaaattccgcaatctacacgagatgcagtaaaacagttacaagaaaaaggtgtacatgtagcaattgcgacagggcgcgcgccatttatgttcgaagatattcgcagggaacttaatatacataattatgttagttttaatggacaatatgttgtctttgaagatgaggtaatatttaataatccgttacatccagatgctttacataggtttactcagtttgcaaaacaagaaggatatccacttgtatatcttgaccatcaagatatgagagcatcagtggaatatcatgattatgtgaaagaaggctttggaagcttaaactttgagcatccagcatatgagcctaatttttatgaggaacgtaatatttatcaaacactacttttttgtgaagtaaatgaagaggaaaagtttattaatcattatccagattttcattttattcgttggcatgcatattcaatggatatcattccgaatggtggttctaaggcaaaaggaattgagaaatacattgaaaagttaggttttaatcgtgatcaagtgtatgcatttggagatggcttaaatgatttagaaatgatcgaagccgttggcacaggtattgtgatgggaaatggccatgaagacttgaaaaaacttgcaaatcatgtgacaaaggatgttaatgaagacggtatatatcatggactaaagtgggctggattgctataagtgaatatggaacccatttcataataaaaaggcggaagattaacttccgcctttttattattatcgctctagaggtttggaatcatcaggagcggcaaaaggattttctttattgatatggtcatagaacataacgccatttaaatgatcaatctcgtgttggaatacgattgctggtaaaccttttaaacgtaattttacttcttctccgttaatagaagttgcttttactgtaattcttgtataacgaggaacataaccaggtacttcgcggtctacagacagacagccttcaccaccctgtaaatatgtacgttcaacagaatggctaatgatttttggattgaataatgcatggctatataatgtaccatccgcatcggttacatgaactgcaatcattttttttgaaacaccgatttgcggagccgctaatccgattccagggcgtaaactatatttttcagccatttcaggatcttggctatttattacgaattcaatcatttcttttaaggtagttgtatcttcttcgcttgccggtaatgacacctcttctgcaacgttgcgcaaaataggatctccttcgcgaataacatctttcattgtaagcatatgtaatctctcctttcctctttagtctaccaaaggagatggaaaaagtcatcggcaagaaagggaaggcattttggaaattgttctattatagagtagttatgtatgtgataaaaagaaaaagacagcaaagccgtctttttctttccatagttgtttcgttttacattagcgaatgcaagcagcaccaacgataattaaaagaataaacaacacaacgattaaggcgaagccgcgtccagacccgccacaagaaccgccataaccgtaggaaggatatgaacaagttggatagcaatatgagtatccgtacatgagatgacctcctttatcatttcccgctaatactgcggttactataatgtatggaagagagggtagaaatgtataggtatttacctaaaaaaggaagagtagtttgtatatttttgttacgaagagagaaaaactaaagagaattaaatcgtttacatattattctaagagaaaaaataagtgaaaaagggaataatataacagtaggtcaatgcttactaatacagatgtaaaaaataaaaacacgtttgtgtagtagaaacctgcatattatttataaaaaaacgtattcaaagtaattgacatcgtaattagaatagttgtaaactaaaaaacgtgatcaagattgtattaatatgtttctgaaaaaacattagtacagattgttaggtacacaaaattattctcaaccgacatacaaacatgttggtttacatcgttgcgctttttaaactggaaaatagccagtgaaagcgtttcagaatatggttcaagagaggaagaggtgaacggaatgggtactaaaacaaaaaagaccctatttaatgttgatgagcaaatgaaagctatcgcagctcaatttgaaacattacaaattttaaatgaaaacggtgaagttgtgaatgaagcagctatgcctgaattatctgatgatcaattaaaagaattaatgcgtcgtatggtgtatactcgcgtattagatcaacgttctatttctttaaaccgtcaaggacgtttaggtttctacgcacctacagctggacaagaagcttctcaattagcaagtcatttcgcacttgaagcagaagacttcatcttaccaggataccgtgatgtaccacaattagtatggcacggattaccattataccaagcattcttattctctcgtggacacttcatgggtaaccaaatgcctgagaatgtaaatgcattagctccacagattattatcggtgcgcaaatcatccaaactgctggtgttgcgttaggtatgaaactacgtggtaaaaaatctgttgcaattacttacactggtgacggtggtgcttcacaaggtgacttctacgaaggtatgaactttgcaggtgcattcaaagctccagcaatcttcgttgttcaaaacaaccgttatgcaatctctactccagtagaaaagcaatctgcagctaaaactgtagcacaaaaagcagtagcagcaggtatttacggaattcaagtagacggtatggatccattagctgtatacgcagcaactgcttttgctcgtgagcgcgcagtaaatggcgaaggccctactttaatcgagactttaacattccgttacggtccacatacaatggctggtgatgacccaactcgttaccgtacaaaagatatcgaaaacgaatgggaacaaaaagacccaatcgtacgcttccgtaagttcttagaagctaaaggcctatggtctcaagaagttgaagagacagtaatcgaagaagcaaaagaagatatcaaacaagcaattgctaaggctgaccaagctccaaaacaaaaagtaactgatttaatggaaatcatgtacgaaaaaatgccttacaacttagctgaacaatatgaaatctacaaagaaaaggagtcgaagtaagccatggctcaaatgacaatgattcaagcaatcactgatgctttacgcgttgaaatgaaaaatgaccctaacgtacttgtatttggtgaagacgttggtgtaaacggcggtgtattccgtgctactgaaggtttacaagctgaatttggcgaagatcgtgtaatggatactccacttgcagagtctggtattggtggacttgcagttggtcttgcacttgaaggattccgtccagttccagaaatccaattcttcggtttcgtttatgaagtaatggattcaatttctggtcaattagctcgtatgcgttaccgttctggtggacgttggactgctccagtaacagttcgttctccattcggtggtggtgttcatactcctgaactacatgctgatagcttagaaggattagtggctcaacaacctggtctaaaagttgttattccatctactccatacgatgctaaaggtcttttaatctctgcgattcgtgacaacgatccagttatctacttagagcatatgaaattgtaccgttcattccgtcaagaggtaccagaaggtgattacacaattgatttaggtaaagctgatatcaaacgtgaaggtacagatgtatctgttatcgcttacggtgctatggttcacgctgcattaaaagctgctgaagaacttgaaaaagaaggtatctctttagaggttgttgacttacgtacagttcaaccattagatatcgaaacaatcatcgcttctgttgaaaaaacaggtcgcgtagttgtagttcaagaagctcaaaaacaagctggtattgcagctaacgttgtagcggaaattaacgaccgtgcaatcttaaacttagaagctccagttgtacgtgttgcagctgctgatacagtattcccattctctcaagcagagagcgtatggttaccaaaccacaaagatattgttgaagctgtaaacaaagtaatgaacttctaatttttagcttttcatgtgcaaaagaaatcagcacatgctggtttcttttgtacatattccataataatgaaatgaatcagggggctgaattccgtggcatttgaatttaaactaccagatatcggtgaaggtatccacgaaggtgaaatcgtaaaatggtttattaaaccaggcgatgaagtaaacgaagacgatgtacttcttgaagtacaaaatgataaagcagtagtagaaatcccttctcctgttaaaggtaaagtacttgaagtacttgtagaagaaggaacagttgcaatcgtaggagatacattaattaaatttgatgctcctggatacgaaaaccttaaatttaaaggtgacgatcatgatgaagctccaaaagctgaagaagcagcagtagaagctccagcagcggaagctactccagcagcaactgcagaagtagtaaatgagcgcgtaattgctatgccatctgttcgtaaatacgctcgtgaaaaaggtgtagacattcataaagtagctggtactggtaagaatggccgtatcgtaaaagctgacatcgatgcatttgcaaatggtggacaaactgtagcagcaactgaggctccagcagcagtagaagctactccagcagcagcgaaagaagaagcaccaaaagcacaaccaatcccagctggtgaatatccagaaactcgtgagaaaatgagtggtatccgtaaagcgattgcgaaagcaatggttaactctaaacacacagctcctcacgtaacattaatggacgaagtagatgtaacagaacttgttgctcaccgtaagaagttcaaagcagtagcagctgacaaaggtattaaattaacttaccttccgtacgttgttaaagctttaacatctgcattacgtgaatacccaatgttaaacacttctttagacgatgcatctcaagaagtagttcataaacattacttcaacatcggtatcgcagctgatacagacaaaggtctattagtaccagttgttaaagatacagatcgtaagtctatcttcacaatctctaacgagatcaatgatcttgctggtaaagcacgtgaaggtcgtctagctccagctgaaatgaaaggtgcttcttgcacaattacaaacattggttctgcaggtggacaatggttcactccagttatcaaccacccagaagtagcaatccttggtatcggccgtatcgctgaaaaaccagttgtgaaaaacggtgagatcgttgcagctccagtattagcattatctctaagctttgaccatcgtttaattgacggtgcaactgctcaaaaagcgttaaaccaaattaaacgtctattgaatgacccacaattattagtaatggaggcgtaataacaatggtagtaggagatttcccaattgaattagatacagtcgttgttggtgcaggtcctggtggatacgttgcggcaattcgtgcagcacaattaggtcaaaaggtagcaatcattgaaaaagctaaccttggtggcgtatgcttaaacgttggatgtattccttcaaaagcgttaatcaatgcaggtcatcgttatgagaatgcaatgcattctgatgacatgggtattactgcagaaaacgtaaaagttgactttacaaaagttcaagaatggaaaaacggcgtagttaagaaattaactggcggtgttgaaggccttcttaaaggtaacaaagttgaaatcattcgcggtgaagcttacttcgtagatgctaatacattacgcgttatgactgaagatgcagctcaaacttatacgtttaaaaatgctgttcttgcaactggttctacaccaatcgaaattccaggattcaaatactctaaacgtgttatcaactctacaggtgctttaagcttacctgaaattcctaaaaaacttgttgtaatcggcggcggttacatcggtatggaattaggtactgcatatgctaacttcggtacagaagttactgtagtagaagctggcgacgaaatcttagctggtttcgaaaaagctatgagctctgttgttaaacgtgctctacagaaaaaaggtaacgtaaatatccatacaaaagctatggctaaaggcgttgaagaaacagaaactggcgtaaaagttagctttgaagttaaaggtgaaatccaaactgtagaagcagattacgtattagtaactgtaggtcgtcgtccaaacactcaagaaatcggtcttgagcaagttggagttaaaatgactgaccgcggcatcatcgaaatcgatgagcaatgtcgtacaaatgtaccaaacatctatgcaatcggtgatatcgttcctggaccaccattagctcacaaagcttcttacgaaggtaaagtagctgtagaagcaattagtggccatgcatcagctatcgattacatcggaattcctgcagtatgcttcactgatccagaactagcatctgttggttacactaaaaaacaagctgaagaagctggaatgactgtaactgtatctaagttcccattcgctgctaacggtcgtgcattatcattaaacagcactgacggtttcctacaacttgtaacacgtaaagaagatggtcttcttgtaggtgctcaagttgcaggtgcaggtgcttctgatattatttctgagattggtttagctatcgaagctggaatgacagctgaagatatcgctcaaacaatccatgctcacccaacattaggtgaaatcacaatggaagcagctgaagttgctcttggaatgccaattcacattgtaaaataatttaagtaatgtaaatagcccttctcttattgtaagagaggggctatttttattttcatcaaatgacttgcaaggtctttaaacgtacttgtcgaatgaatatataatactttaacaaatgattcaggcttaacttacttcgaaggtaatatatatcatcctataatatgtaattgattcaaacttacccccatatattaataaaatagagcatgtcaaaggagaaggttccatgaaaatattacatgttatattttatcatttactactatggagtggcttttccactgtattaacattatcgaatggtgataagtttcattataaagttattctttttttcgtatttctatatttagcctatgtaatagcatattttgtattgcacgtaagaaagcaagctttatttcttacatgttcgaattgtatattatttttaatcatattatctattttttaaattagcgtttataaaaatacattgttcttccattaaataattgtaactctccttctaatttcttcgctaaaaaacggcaaaattcatttgctttccctttgtcaccaaatgttgcattaggtggtaaagaaacttggatgaaagattgttcattttctataccaacaccaatataaattgagtcataccggtcgtgagtggattgaagttttaatgttgttgtagatgtatctaaaatttcataaggaaaagcggtatttgtatacgtgtaattaatttgggcaccagttttagaagtaactgttttataataatgaaaaagttgttttatatcatctattgaaactgattgttggttggatttcggtacaagcgtaataaaggcgtgttgcatataagttccccctagcttagtagaatactatcattctacatcctactgaattttttgacaattaaaaggagtattacatgttttgtttaatatactattaatgaaacgtgatgtagaaaggtggaaaccaatgtttgaaaaattgtatgatgagcatgaaagtgtgaaggtacgatttttagggtttatgacacatgatacacgttatgattttggtgttatttatacaaatatgttttttggaaagccgctcattgtttgtatgcaaacaggaaggtctactttactcggacgagatgatgtagagaatgttcaatatatacaggagatttttaaattaggatcagaagaggaagcaaaggagttagctcagtttttcaaatttctagttccgtcaacttctttacatgcggaatatgaagaataattaatgtgaaacagtcgtacttataaatatggctgtttttttattttaatatcgcatactaatttaaattaaaaatatttaatgtgttatactaaaaacctattgacgtaaaaagtataacatattaaaataaagacagaaagttaagcggttacaaaaagtttttgggattataaacttagggggaaatgaaaaatgggaacaatcgtatgtcaagattgtgaaggtacaattgcacacttcgaagatgagaaagtaacggtactttacgggaaatgtggatcttgcggatgtgatcacacagagcatacaaaagcccaataattgataggaaatggacagctaaaagtttttaggaccataaacttagggggaaatgaaaatgggaacaatcgtatgccaagtatgtgaaggaacaattggacattttgaagatgaaaaatcaacagtactatacgggaaatgtggatctcattgcgaatgtgaccataaagaacatacaaaagcttaataataagaaaaagcgcctacatgtgtaggcgcttttttaataaattgtagttgtatgaccaactgttgcaacgattgcatcatctctaattggaataaagcttatggatgtctgtggtgtactagaagaagcatattggctcattatacggctatcgatacgggtaatagtatcggtcaagaaagctgaaataaaagcgtaagggactcttcgttcatttaatgaataaataatttcttcttttgtttttacacccacgccatgtccgtaaaaaaagaaatttcctaaatagattgtgttttctccttgccactcaatcgtagctggattcacttgtgggtttttaaagtaaacgaggtcacctggaacaagatcgccaccgttttttgttatgagccttagatcttgatcgtagtcccatgtataaagtaaaagatttgcaaatagacgattgaaagtttcttcctcatacaatgatagtaaagctttataaaaaataatgatcatagcggttgcgcattcagttccatatagttttccatttttaaaaatatcttgtatggcaatagaagatggtatgtttggaagaagctcgaatcctccaagggatgttcttttccaatactgggggttgcaaaaggattgttgaaatgtgcgaaactgaaatccactttgaaaaagctctagtgcagagataataatattaactcgtaaattgagatcaaagctgagttcatcagctgttcggaaggaataaacttcttgatttcctgccattattgataaaatttgttgtttctctgctgcaaatggctcatattcatttgtaatataaggatgtacaatagaacggcctattacaatcataatagtatccccacctatacgttacattcttaagtatcgtatgaagaaaaggaaaaaaggtgaaaaaaaagcctatcaactgataggcttgtactctttaataacacgtaatgtttgtaatgtcatatcttcaggaccttgtacaggtaaacctgcttctaagtttttccgaatatactctaagttttcttgtgtaataatttcccccggagtaaagattggaatccctggcggataaaccataacaaaatcagctataatacgacccgctgcattttcaaatgggatgacttctgtttccgaataaaaagcatctcgaggagaaagtgctagcactggaatttctggaatctctacttgtacttgaacacctttatctgccctatttctaaatgttgctgctaaatcgtgtaaagctgcaataagtgtatttgtatcactttctgtatctcccaaagtgataagacatagtatgttgtatagatctgagagttctacttcaatgttatattgctctctaagccatacttcagcttggtggccggtaatacctaaatcttttacagatacaattatctttgtaggatcatagttaaaggtagcatctgtacctaacatttcttttccaggacagtaaagatgctcaatagaatttatagcatcacgaacatgctcagctaattgtattgtttgttctatgagtgctgttccttctgtagcaagacgttttctcgcaacatcaagggatgctaacaagatgtaagaagttgatgtagttgtaagcatgctaataatagattggacatgctttacattcactaagccttctttcacattaagaatagaactttgagttaaagagcctcctaatttgtgaacacttgttgctgccatatccgcaccagcttgcatcgctgacataggtaattcatcgtgaaaatgaatatgaacaccatgagcctcgtcgactagtacagggatgttataagaatgtgctaattgtacaatctgttctaagtctgcagcaaacccaaagtacgttgggttaataacaagtaagccctttgcatctgagtgctcttccagtgcttttttgacagattgaattgtgattccatgagaaataccgagcttcggatcgatttcaggatgcatgaaaatcggttttgcacctgagaaaataatagctgacattactgatttatgcacgtttcgtggtactaggattttgtcaccaggaccgcaaacgctcatcaccattgtcataatagcgccacttgtaccttgaatagaaaagaaagtatgatctgcaccgaatgcagcggctgctaaatcctgtgcttctttaatcataccttttggatgatgtaaatcatcgagtggcgcaatattaattaaatcaattgctaatgcattatgcccaataaattcgcgaaatgtaggatccatgccctgtccttttttatgaccaggaatatggaattgaattggatttcgcttactgtgctcaactaaagcggtaaacaatggtgtttcgtattgggacaatctatacaccccttcttcttcataatatttagtgtaatttgttttatataatcctgctctaaaaaagtgtagccttttttagaataaggcttgtttttctgccattcaaaaaatcgtttttgagatggtagcttcactttattttctataaaacaaaagcattatatcaccaataattatagatgtatagaaaaaaatgtttttaaggtgagtatgtttaatagttagcctcaactaatgaatagaggaagacaattccattaaaatgaataaatagtgtataatgcagagtggctataatgaagaataaaatattctctttaagatagcataatgaaacaagaagaaatgataaatgaggtgcgaaatggaatatcaatatccgttagattatgattggtcaaatgaggaaatggttacaattgttaagttttatgaagcgattgagaaagcttatgaaaaagggattataagagaagagttaatgggtttatatcgtcgttttaaagagattgttccatcgaaagcagaagaaaagaaaattgataaagaatttcaagaagtaagtggatactctatatatcgtgctattcaaagggcaaaagaagtcgaagaacaaaagctcgtaaaaatgtaaaaaatattttgaaaaataaaaactgaagtgatataatgtgataacaactaaaaacggacaatataaattgtccgttttctactatcgattacacagtgcatataaaggaaggagtgattgcatcgtagattcaatcttagcaaggaattgttcgttggtcattgctgaaaactcctctggtgatatatgaataccaactaataattctgctttttttacagtagctaatcgttcaatcatcttttgtaagtcttcggtttcaagtgttttatgtaatttcacacttggtttagtatggtcaatggaccaaacgaagtcatttggaatatttgtttttaaatcatttaaatgttctaagaaggcatgagccgtctcaactttttgtggacactcatagattaaaccaaagtatatgaaggcatgagtaccccataagccgatttggaaatgcggtagcattttatatcctcgtttatttgttgaaaaagcaacccaagtatcgtttggtggattgactttgcggcgtgcgtgttttgcaacatgataaaaaaagttctcatcagtttgtttggataagtattctgcaaattgttcccctaaagcttctagcttaggatgaatgttcgttttaattgcactcattcgttcttcgagaccatcaactgtaaagacatcaaaatcagttgacttgaatgtttgtattgtcatgattgttcctccaactcctattttgcttttattttagcatagcttgtactattcataaaaaaaacagcacaaaaaaatttaaataaaaaaatataattttgttgcatagatgatttatccaacatagtatagtataaaacaaaaaatcagaaaatttaattaattctagtccgagggcagacgaatattgggaggaggcaaataatatgagacaggtgattaatgcgttaaagagaacagatgctgaaaagagaataccggtgctacgtttggagctagattatgaattagcaactttatatgatgcgatgatggaagatgacaaacagaaaaaagaagagtgtgtacaaaagttagaagtgttaagacttgaaatgattcgtttagaagcgtaataatagtatatgtataaaaaattagttggtgcgaaccttataaagggttcgttttttctgtgaacagtatagatcggagtgtttaaacatgcaagaagtatggaaagacattgatgcacacgccaaacggtggattcgggatgcaggagagcatttaatggcatcaatgaaaaaagcacttattatagaaacaaaatcaaatgcagctgacttagttacaaatatggaccgagagatagaacagtttttaattgggaaaattaaagaaacattcccgaatcataatattttaggagaagagggttatggagacgagataacgtcttctgacggggttgtttggttaattgatccaattgacggcacgatgaactttgttcatcaaaaaagaaattttgcgatttcaattgggatttatgagaacggtatcggaaagattggacttatatatgatccagtgcatgatgaactatatcatgcagtcaagggatatggagctttttgtaatgatatatcaattcctacactgaaaaaaggaactgtagagcaaggtattgtagctttaaatgcgatatggcttacagataatccattgcttaatatggaaagtatgatggcacttgttaagaaagcaagaggcacaagatcatatggctgtgcagcgttagagatggtatacgttgcaacaggaagaatagatgcatatgtaacgccgagattatcaccatgggattttggcggaggaaagataattgtagaagaagttggaggtaaggtgacgacattctctggagcgccactttctatcatagagaagagcagtgtgttagttgcaaaaccaggagtgtatgaagaagtgttatcgtttatatgagagcaacaaaaaaagtaagaggctgtgtataagcttcttactttttagcgttattgtgatttgcgcatttttctttttgttacaaaaccgtatccaactgtaacaaatgtgccgataatgcaaataataataccgattggactattttcagcaatcataatgccgataccgattaagaaaataacaccgataattgcagttaataaaaagcgatattgaatgtgttccatttcttcaccctccaatctcattttactttcacaaaagtaagaatacaactatattttcattcttgcttttattttaattgctattgtatccccttcgctcttataatagagaaggattaaaaagacattaggagttggacatgttgaaaaaacgacaagatttacgtaatatagcaattattgcccacgttgaccatggtaaaacaacacttgttgaccagttattacgtcaagcggggactttccgtgcgaacgaacacgttgaagaacgcgcaatggattcaaatgatctagaaagagaacgcggtattacaattttagcgaaaaatacagcgattcactatgaagataaaagaattaacattttagatacacctggtcacgctgacttcggtggagaagtagaacgtatcatgaaaatggttgatggtgttttacttgttgttgatgcatatgaaggttgtatgccacaaacacgatttgttttaaagaaagctcttgagcaaaacttaactccaatcgtagttgtaaacaaaattgaccgtgacttcgctcgtccagatgaagtagttgatgaagtaatcgacttattcattgagcttggtgcaaacgaagatcaattagagttcccagttgtatttgcatcagcaatgaacggaacagcaagcttagattcaaacccagcaaatcaagaagagaatatgaaatcattattcgatacaattatcgaacatattccagcaccaattgataacagcgaagagccacttcaattccaagtagcacttcttgattacaacgactacgttggacgtattggagttggtcgcgtattccgcggtacaatgaaggttggacaacaagttgctttaatgaaagtagacggaagtgtgaagcaattccgcgtaacgaaattattcggttacatgggattaaaacgtcaagaaattgaagaagcaaaagcaggggacttagtagccgtttctggtatggaagacattaacgtaggtgaaacagtatgtccagttgaacatcaagatgcgttaccattattacgtattgatgagccaacactacaaatgacgttccttgtaaataacagcccatttgcaggtcgtgaaggtaaatacattacatctcgtaaaattgaagagcgtcttcgttcacaattagaaacagatgtaagtttacgtgtagataatacagattctcctgatgcgtggatcgtatctggacgtggggaactacatttatctatcttaattgaaaacatgcgtcgtgaaggttatgaattacaagtatctaagccagaagtaatcattaaagaagttgatggcgtaagatgtgagcctgtagagcgtgtacaaatcgatgtacctgaagaatacactggttctattatggaatctatgggtgcacgtaaaggtgaaatgttagatatggtgaataacggaaacggtcaagttcgccttactttcatggttccagcacgtggtttaattggttacacaacagaattcttaacattaactcgtggttacggtattttaaaccatacattcgattgctaccaaccagtacacgctggacaagttggtggacgtcgtcaaggtgttctagtttcacttgaaacaggaaaagcatcacaatacggtattatgcaagttgaagaccgtggtgtaatcttcgttgaaccaggtacagaagtatatgctggtatgattgtaggagaacacactcgtgagaatgacttaacagttaacgttgtgaaaatgaaacaacaaactaacattcgttctgcgacgaaagatcaaacttcaacaatgaagaaaccacgcctaatgactttagaagaatcattagagtacttaaacgatgacgagttctgtgaagtaactccagaatcaattcgtctacgtaaaaagattcttgataagagtgagcgcgaaagagctgctaagaaaaagaaatctgtcgaagcgtaaaaataaaaaaacaacgccctttataaagggcgttgtttttttattttgtttattttttagaatatttactcatttttgtggacagtattttttttgcgagttactcttgtattaagtgtataaagaaaattgcattttactgctaggggggaagagtgtgttagaaaggatgtctttttttgcaaaattgtgtaaggtagatgaaaatccagagttaggaatgtggttactttatgggacgattattatattaagtgctctcgtttataatttagggtttgctagaaagttgtctgtactaaaaaatattgtgatatacatatcattagcaattggatgcacagtattaaccttttttgctgtgtttttacctgttggagaaggacttgttgtagcggcaattgtacttggaatttatagattgcgtttgcgtcaagcgaaacaacaaaaagcaggataaggaaggggagttttcatgcgttcagtacaagatgcactatataattggttaacaattaaaacagttgcggaagcacgcccagatgatagtgctgcaaaagaaacatatttgttatttcaaaatatgatatatgaagaacataaattaagaaatgttgaagtcgaaaagaacgaggaaatgtatttaattacatatgaaatgaatggagaacggaaatctgcaaggtttccgttagaagccattgattgttttttggatcagatgaatcgtgaaccagaaaaatataaataagtccttatctatatgagtaaggacttatttacattttaccaatcatcttcgatttttttatcacgatataatcggaaattaccacttgcatgacgttccattgtacgctctgcaattcgttccgaacattccatgcacatatatgtatgaatagggcgattacgcagtttttttgccataggattttcatcatctaacatatcttttttatcacaaatcatacatttgactctcatttcgtcacctcaatacgaattctatcagtataagtatatcatggaagtataatgtttttgaataatagtgggaaaaaataatattttcgcaattcaaaaaataagttatgataaggatataccaagtatgtttggaggtgaaaatatggcgaatgtagtagagcctaccttaacagaggatttagtacaaacgttgcgtaaagagtgtattgttatgatagcaacggcagatttcgaaaagcaagttcctaacgtaagtgctatttcttgggtgtatgcagtgagtaaaactagtattcgatttgcagtagatcaacgttcacgtattgtggaaaatatacggcataatacaggtgtggtattgactataatggcgaatgaatccgtattttctataagtggtgcaggtgaaattttgacagatagaatggaaggtatttctctaaaattaactgtaatagaagtaaatgtgcaagaagtgcgtgatgttatgttttatggagcgaaacttgcaattgaaccaacatatgaaaaaacatatgatcttcgggcagcgaaaaagctggataatgaagtgttagtagggataagagaattataaagatgctaaataggaaattcgtttattcacttttgtaatcggttattgtgatttaacgttaataattataataaaaagtaatatattgaatagaaatgaataaagaataaataaaaggtttaatgactatgattttcgattctacctcgtttacacggtacatataattataacaatggttcgtccatattgtatggatgaaacccttgttctacaaatttaaaagtggagtcagggggtaacaggttggataaaatttatgtgttagatacgaatgtacttttgcaggatcctttatctattttttcatttgaaaccaatgaagtagtgattccagcagttgtattagaagaggttgattcgaaaaaacgttatatggatgaagtaggacgaaacgctcgttatgtatctaagttaatagataaatttcgtgaaataggaaagctgcatgaaagtatcccgctagaaaacggcggaacatttcgtattgaattgaaccatcgttcattcgtgcaactacaagatatttttgtagaaaaaacaaatgataatcgaattttagctgtagcaaaaaatctatctttagaagaacaggaaaaagaggacgggaagtctgttattttggtaagtaaagatgtgctcgtaagggtaaaagctgatgcaattggtttgaaggctgaagattatttaagtgatcgcgtaattgaagtagaaaatatatattctggctttttagaaggatatatatcaaaagaacaattggattatttttatgagaaaggtgaattgcctctatctgaaattgcgaatcatcctttttacccaaatcagtttgtagtgatgaaagatgcattagggggctctagttctgctcttggcattgtggatcacttaggtaagaaggtaaagaaacttatttttcacaatgaacaagtgtgggggatacgaccacgaaatgtgcagcaaattatgggattagaattgttgcttcgtgaagatattccgcttgtaacgttaacggggaaagccggcacaggaaaaacgttacttgcgttagcttcgggacttatgcaaacagaagacttagggttatataaaaaattacttgtggcaagaccaattgttccagtcggaaaagatatcggttatttaccaggagaaaaagaagaaaagttaagaccatggatgcagccaatttttgataacctagagtatttatttaatacgaaaaagccaggagagttagatgctattttagctggaatgggttcgattgaagtagaagcccttacttatatacgcgggagaagtattccagatcagttcattatcattgacgaagcacaaaatttaacaaagcatgaagtgaaaacgatattaactagggtaggggaaaagagtaagattgtattgatgggagatcctcagcaaattgatcacccatatttagatgaatataataatggcttaacatatgttgtagagaagtttaaagaacagcgtattagtggtcatgtgaagtttgttaaaggggagcgatctaatttagctcaactagcagcagatttattgtaaaaaggagtgagcttaagctcactccttttctttaaataattgtaaatttacggatgttacggattggattttgttgattagatccatcattgaaatagagatgaacaggcccgtcttcttttaatggttttccttcttttgaaaagcctagtatagcatttttgacagtttctaatggaagtgtcattgtatgatctaccgtttcaatttcaacttgcctagcgtcctctaaaatttcagcgttagcaagaaatggatgaaatggtataccaaatgttccagtaatcagctgttcttttttatatttcttcacactttgttgtattggaggaaaagcggcaccatcacggatttcgcgatcccaatgttctgaagtgttttttaaataagtttctagttcagacgtgttttctctagtttcatcaaagtaagttgtcaaatctacttttcgatcatcaaagatccaaacagttggatcaatagtgattggaaaacgtacttttccgttaataaataaaatttcgctcattgttgttcccccatttgtgttatactcccacttttcagtataatagtattagacactgttgtcacaaaaaatgtttctattgcaatttattaaaactatcgctaatattaatagataggatagaggagagtaggacggaaacggagggaatcaatttggcgtctgagacagtagcaaatcatcaggaaaaggcactagcccttctacaagcggatgcagagaagattttaagacttattaaggtgcaaatggaccatcttacaatgccgcaatgtccattatatgaagaagtgttagacacacaaatgtttggactatcccgcgaggtcgattttgcggttcgccttggtcttattgcagaagaacaagggaaagcaatgttaggtgagctcgaacgtgagttatctgcacttcatgaagcatttacaaacaaacaacaataacgggttcaaataagggggctcaaactaaattagtttgagctttttatttgtataataaagcaggaagaatcaatgtacatatggaatacaacaataattaaattgaaacagaaagaggaaatgaaatgaaaaaagtatggaaatcaatggattattcattattacttcctcttgttatcttatgtgtgctgggagtaataatggtatatagttctagttccattgttgcgatttcgaggcataactggccggcaaattacttttttaaaaaacaattaataactttagctattggaacggtattgttagtaattgtagcttcgttaccttataagttttggagaaaacgaataattttatcggcgatggggctagggagtattgctttactagcagcagccttgatttttggtaaggaaataaatggtgcaaaaggttggatattaggtatacagcccgctgaatttgttaaattatcgattattattatattagctcgcttttttgcaaggagacaagaaacaaatacacctgtttttaaagggtcgggacttacacttggttttgttggaatggcaatgtttttaattttaaagcaaaatgatttaggtaccgatttgttaattgcaggaacagtagggattatgtttctttgttcaggagtaaggattaatttatggattaaacgaattgttttaacttctatagtatggattccagctctatattttttggctaattataaattaagtggatatcaaaaggcacgtttttcagtttttcttgatccattcaatgatcctcagaatgatggattccaattagtaaattcttttattggaattgcttcaggagggctaaatggtcgaggattaggaaatagtgtgcaaaaatatggttatttaccagaacctcaaacagattttattatggctattatatctgaagaattaggttttattggtgtagctattattttaatttgcttgctacttattattattcgttcattcaggattgctcaaaaatgtaacgatccttttggaagtttaattgcaatcggaattgcaagtttaataggagtacaaacttttgttaatgttggtggtatgtctggattaataccgcttactggagtgcctttaccgtttattagttatggtggaagttctttaatagctaatctacttgcaatgggaatactacttaatattgctagtcacgtgaaacgacaagagaaacaacagaatggtgtaatgaaagaaagagaacaaaatggaccacatcttgtagttgtaaaataaaaacacattgtgctttagagcatgatgtgttttttatttttaagtagttttaaatatgatgtactaatttctctttcagttaaaaggtatatcacattaagttaaatgtgatatacaattaagttgttagaaaaggaagaggtatgctatactatttttgtgaaacaaattgcacagaaaacttatcatttgttagaaaataaggtatgatggataaaaataaagtgaagctttctaagtataatataatgtggaaagtgaagaacttcacgctttttaaggtgtgtatatattttatctctagagtggtaggaaagtagagggggaaaatcatgacaaagctgcaacgtattcaaaaagtattggtagctaaccgtggagagattgcaattcgtgtgtttcgagcttgttcggaacttggattaaaaacagttgcaatctattctaaagaggatagtggttcttatcatcgctataaagccgatgagtcctatttagttggggaaggaaaaaaaccaattgatgcttatctagatattgaaggcattattgagattgcaaaaagtaatcatgtagatgcaatccaccctggatatggtttcttgtcagaaaatattcaattcgctaaacgttgtgaagaagaaggaattatctttatcggtccgaaaagtaagcatttagatatgtttggagataaagtgaaagcaagaacacaagcgcagctagcacaaattccagttatacctggtagtgatggtccagtaaattcattagaagaagtcgaaaaatttgctgaaaagtatgattacccgattattattaaagcatcccttgggggtggcggtcgtggtatgcgtattgtgcgtactagtgaggaattaggagaatcatataatcgagcgaaatcagaagcgaaagcagcttttggtaatgatgaagtttacgtcgaaaaattcgttgaaaaacctaaacatatagaagtacaaattttagcagatgaagaaggcaatgttgttcatttatacgagcgtgactgttctgtacaacgtcgtcatcaaaaagttgtagaaattgcaccgagtgtatcactttcagatgatctgcgtcagcgtatttgtgatgctgctgtgaagttaacgaaaaatgtaaactatttaaatgcaggaacagtagaattccttgtaaaagatgatgagttttactttattgaagtaaatccacgtgttcaagtagaacatacgattacagaaatgattacgggagtagatattgttcaatcacaaattttaatagcggatggacattcattacatagcaaaatggtaggtgttccgaagcaagaggaagtagttgtacatggatttgcaattcaatctcgtgtaacaactgaagatccgctaaataattttatgccggatacaggaaaaattatggcgtatcgatcaggtggtggttttggtgtgcgtcttgatacaggaaatagcttccaaggtgcagttattacaccgtactacgattctttacttgtaaaagttacaacttgggcacttacttttgagcaagctgctgcaaaaatggaacgtaacttaaaagaattccgtattcgtggtattaaaacaaatattccattcctagagaatgtagtaaagcataaaaacttcttatcaggagaatatgatacttcatttatcgatgcgtcacctgaattgttcttgttcccgaaacgtaaagaccgtggaacgaaaatgttaaattacattggtacagtaacagtaaatggtttcccaggagtagggaaaaaagaaaaaccaatattcccagatgctcgtattccatgtttaaaacattcagagccaatccaaaatggaacgaaacaaattttggacgagcgtggagcggacggattagtaaaatgggtacaggatcaaaaacgtgtacttttaacggatacaacattccgtgatgcacaccagtcattacttgcaactcgtattcgtacaaaagatttacatcaaattgcggagccaacagcgagaatgttaccgaacctattctcagcggaaatgtggggcggtgcaacgtttgatgttgcgtatcgtttcttaaaagaagatccatgggaacgattactagatcttcgtgaaaaaatgccgaacgtgttattccaaatgttacttcgttcttcaaacgcagttggatacaaaaactatccagataatttaattcaaaaatttgtggaatgttctgctcaagcaggcattgatgtattccgtatttttgatagtttaaactgggtggaaggcatgagagttgcaattgacgctgtacgagacactggtaaaattgcagaagcaacaatgtgctacacaggggatattcatgatccactgcgtagtaaatatgatttaaattattataaaaatttagcaaaagagttagaagcatcaggagctcacattttaggtattaaagatatggcgggcttactaaaaccaaatgcagcatatgatttagtttctgcattaaaagagacagtgtcgattccaattcatctgcacacgcacgatacgagtggaaatggtatattaacgtatacgaaggcaattgaagcaggtgttgatatcgtcgatgtagcagtgagttctatggctggtcaaacgtcacaaccaagtgcgaacacgctatactatgcgttaggcggaaacgaaagacaaccagatgttaatatagattctttagaaaaactatctcactattgggaagatgtacgcaaatactatgcaccgtttgaaagtggtatgaatgcgcctcatacagaggtatatatgcatgaaatgccgggtgggcagtatagtaatcttcagcaacaagcgaaggcggttggtttaggagatcgcttcgatgaagtgaaagtaatgtaccgccgtgtgaatgacatgtttggagatattgtaaaagtaacaccatcatcaaaagttgttggtgatatggcattatttatggttcaaaaccatctaacagaacaagatgttttagagcgtggacatgcgatggacttcccagggtctgttgttgaaatgttctctggtgatttaggtcaaccgtacggtggtttcccgaaagaattacaaaagattattttaaaagggaaagagccattaacagtaagaccaggtgaattactagagccagtagatttcgaagcgttaaaagaagaattattccataaacttggacgcgaagtaacgatttttgatgtagtagcatatgctttatatccaaaagtatttatggattatgaaaaagttgctgagctttatggaaatgtatctgtacttgatacaccgacgttcttctatggtatgagactaggtgaagaaattgatgtagaaattgaacagggtaaaacattgatggttaaactagtatcaattggagaacctcagtcggatggaaaccgtgttctttacttggaatttaacggtcaaccacgtgaaattatcgtgaaagacgagagtgtaaaagcaacagttgcacaacgtgtgaaaggaaaccgtgagaatccaaatcatattagtgcaacgatgccaggaacggtaattaaagtagttgtaaaagaaggcgacgaagtgaaaaaaggcgattctatggcaattacagaagcgatgaaaatggaaacgacagttcaagcgccgttcaatggtaaagtgaagaaagtatatgttaacgatggtgatgcgattcaaacgggtgatttacttattgaattagatcactaaaataagaaaagagctgtgtaaatacagctcttttcttattgcaaaaaatcccttgccgaattggcaagggattttagttttaaattattttgtttgtttagaagttgattcggcttctttggcattcactttacttcttgttcccagcataactaaatagcatagtacggcaaacaagcaagaaatgaatagagaatgtaacaatgccattgctaaactagcgtttgtaaatacaactaaaactcctactacagcttgaagtgtaacaaggataaatgaaataatccatccccaatatactacagattgctgcttgtaatggcgaatagcgagaatcatcgcgtatagtatccaagcgaaaattaacatcgctgcaactctatggcccatttgaacccattcatgtagttgagttggcataggtctgtttttgctacataaaggaaagtctggacaggctaagctagctcgttcgtgacgtactaaagcacctgtgtagacgacgatataactgtaaattgttacaccataaatatgaaatttcatttttttgtccataataagtgaacgtgcatcaaatttttggtcaatttcaaagataagacacgttaataaaatgacagaagcaaatgaaattaaggaaataccgaaatggatagcaagtacagctggcatttgtccccaaacaactgctgctgctcccattaatgcttgtgcaactaaaaatacgaaggataaaattgctaacgtttttgtttcacgcacatgtttataatatttccaggacaaaatacaaagtagagtgacaagaattccagctgatcctgatgttaatcggtggctaagttcaataatagtttccattgataaattagatggaacaaattcaccgttacaaagtggccatgatttaccacaaccttgaccagaacctgtttttgtaactaaagcgcctcctaataaaactattaataaatcaaggcttgtaatgactgctaaccatttaataaagcgttgcaatctctttcaccatctttctgctatgaagttattgcgaaatattttcattccattatgtatagaataaaacgcgctagttcctatgatatataaaaaataataaaatagcaaagaaatggagggggaaggaaagggagagaaaataggtgtaaaaacagggttcgcaaggaaaattttgggtgaaaaataggctattttgaaaagaaatggggagaatacgtgttaaataggacaaaatagtttattatagaaggtaacatcatgttatgataaggacaagtcagaatgaagttttttatattcgacacaaaaagttcatgttttcttcacaaaatgttcgggaaatatgatttaatatattggagtatgggcgtagattagtagtagaatgggttaacaatgtttctactgtaataatattgctatatagaagcgaattatttcatttgaaataggcgcaaaaagaaagatgaaagttttaagagggggttagagtgatgaaccatgcaacaagtgagctgcatgatgagtccgctgttacaagtgtaccggaaacaactcggttacaagatttaaaagcactcgttaaaatggggattgtaaactcaaatacacttactgtatttacaggattttggttggcattacactttaatggattaagtgtaatggacaatctggataagttattctttacaatcgttggttcaggattaattatggcaggggtatgttgtttaaacaactacattgatcgagacatcgatccattaatggaaagaacaaagacccgtccaacggttactggaaagtataaaccaggatttgcacttacatttggactagtcatattacttcttggttttgtatttttattattaacaacaccaatggcagtcttaatgggatttattggtgctttcacatatgttgttctatatagtttatggacaaagagaaagtatacactaaatactgttgtaggtagtatatctggtgcagttcctcctttaattggatgggcagcaatcgatccatctttaggccatccaattgcttggatgttatttttaattatgtttatttggcaaatcccacatttccttgcattagcaatgaaacgtgttgatgaatatcgaaatgcaggaattccaatgcttcctgtagttcatggatttgaaattacgaaacgccaaattatgatttggacagtatgtttattaccactaccattttatatgagtggactagggataacatttatggtaattgcaacactgcttaacatcggatggatcgttttaggattttatggcttccgtaagaaagatgacatcaaatggtccgtgcaaatgtttgtttattccctaaattatttaacaatcttatttgtatcaatgattgtagttacattcttctaagacaacgacataattggatttctttacgttgagatttactttacttaactataaagtacaatctaattcacaaggaaagtgggggttgtttgtatgaagaaacagtggcgactgctttcgttcgtttcactgctggctttactgttagggggatgcggtaaagcctttcaatctactttaattccgcaaggagaagtagcaaaaatgcaatatgatttacttctactggcgagtgcaatcatggtaggagtagtactagtagttactattattttcttatatgtaattgtgcgtttccgacaaaagaaaggtcaggaagattatattccagagcaagttgaagggaatcacaagctagaaattatatggacagttattccgattattcttttactaatcttagctgttccaacagttacatatacattcaaacttgctgatgtaagtgcgatggagaaaaagaatattgataaagatactatcgttgttgatgtaacagcgaatctttattggtgggaattttcttataaatcagaaaagatagtaacttcgcaagatttggtcatccccacaggtaagaaagtgtatttaaatttgaagggtgccgatattaaacactcattttgggttccatctttagcagggaaaatggatacaaatacagacaatgtgaacaaaatgtggttaaaggcagataaatcgggcacttataatggtttttgtacagaattttgcggcccatcacattctttaatgcaatttaaagtgaaagctttagatgaaagcgagtacaaaaaatggcttgctgatatgaagaagattgatgggaagaaagaagtagcttcaacaaaggcgcaagagggccaagaaatatttaataaaagctgtattggttgtcacgcagttggatctaatgatagtagaccaccttccgctcgtatcgcaccaaacttagcaaactttgcggatcgcgatatggttgccggtattgccgaaaacaatgaagaaaacttaaaaaaatggctgaaagatcctgaaaatatgaagccaggaaacaaaatgactggcaaatatggcaacttaacggatgatcaaattgatgcattaaatgcatacttacaaacgttaaaagttgaaaagtaaagagggactattcgcgaaggggaggttgaaaacgtgagttctgtagcaaaaaaacaggggatgggtgctgtcatatgggattatttaacgacagtagaccataaaaagattgccattctctatttaattgcaggtggattgttttttgtaataggcggaatagaagctctatttattcgccttcaattagcgattcctaacaacgcttttcttgttggggatgcttataatcaagtattaacgatgcacggtacaacaatgattttcctcgcagctatgccactcgtgtttgcatttatgaacgccgctgtaccacttcaaattggtgcacgtgatgtagcgttcccgtttttgaattcactcggattttggttatttttctttggtggagtatttttaaatttaagttggtttttaggtggagcacctgatgcaggatggacatcttatgcatctttagctttagcctctaaaggtcatggtgttgatttctatgtactcggcttgcaaatctcaggtattggtacattaattggaggaattaacttccttgtaaccattattaatatgcgcgctccaggaatgacgtatatgcgtatgccgatgtttacatggacaacatttgtaacatcttcgcttatattattcgcttttccgccgttaactgtaggattaggacttttaatgttagatcgtttatttggaacaagtttctttaatccggcattgggcgggaatacaattatatgggagcatttattctggattttcggtcatccagaagtatacattcttatactcccagctttcggaatattctcagaaatcttcgcaacattttcgaaaaaacgattgtttggttattcatcgatggtgtttgcgactgtattaattggatttttaggatttatggtatgggcgcaccatatgtttactgttggacttggtccagttgctaatgctattttctcagttgcaacaatggcgattgcggttccgactggtatcaaaatattcaactggctctttacaatgtggggcggaagtattcgttttacgacaccaatgatgtgggcagtagctttcattccatcattcgtaatgggtggagttacaggggttatgctagcatctgcaccagctgattatcaatttcatgataactatttcgtagtagcacattttcattatgtaatcgttggcggtgttgtatttggtttacttgcaggagctcattattattggccactgatgtttaataaagtattaaatgaaacattaggaaagataacgttttggctattctttatcggcttccatttaactttctttattcagcatttccttggcttgattggtatgccacgccgttactacacatatcttgaagggcaagggttggaaatggggaatatgattagttccatcggagcggtgtttatggctcttggaacgattgttcttctattcaatgtaattaaaacaacagtatcaaaagaaaaagctggtcgtgatccgtgggatgcacgtacattagaatggacaatgccagcaccgacaccagaatataactttaaacaattaccatttgttcgcggattagatccgttttggattgaaaaacgtgaaggtaataaagaaatgacagcagcggaaccagttggtgatattcatatgccaaatccttcgttttcaccatttgtcatttctttcggattgtttatagcggcatttggtgcgatgtatatgcagggcggaaaagataagttctggttattagtagcaattattggtttaatcattacatttggcacaatgttcctacgttcagtaattgatgatcatgggtatcatattcataaagaagatttagaggataaggggggcaaggcataatgcatgtagatgaaaaattaacgaatgaaacatttccagcagagcctgaaaaagcaacccttgaagggaaaaataagtttgtcggtttttggctatttcttggaggcgaaacagtgttgttcgcttccttattcggaacatatttagcgttaaagaattctacaaatggtggaccaacatctcaagagatgttccaaatgccactcgttttcattatgacgatgcttttattaacgagtagcttaacgagtgtatatgcgatgtatcacatgaaaaactttaactttaagaaaatgcagctttggttactagtaacagtattgctaggtttagggtttttaggatttgagatatatgagttttatcattatacacatgaatttaagcatactatgagaagtagtgcctttggctctgcgttttatgctcttgttggtacacatggactccacgtattgtttgggttatgttggattttaacattaatctttagaaatgcgaagagaggtctaaatttatacaatgcaccgaagttttatgttgcatcgatttattggcactttattgacgtagtttgggtgtttattttcactgtagtatatttaatgggaatggtgggataaacaatggcgataaagcaaacgaataatcctaaagttgatcttgtttatcggaagagaaaaagtgcggaggaaatgaggcatcaagttattacgtttgcattaatgatttttttaacattagttgcatttgtagcagtagcgtatccaaaaacttttagtccgattttctctgtaccgtttattttactattagcagtggtacaagtaatttttcaattgtattattttatgcatatgagtcataaaggacatgaagcagcaagtttctttctttactctggtctgctaatagggttaattacaattttagcttttatgacaattgtgtggatttgaaaagtgaaaaataagggagcttgtgttgtcacagctccctcttcatattatgagataaccttacgaaggcaggtgtgaaaatgagtaacttgtggatatttggttttcaggctttatggagtccaatctttttattatttatgctttcgattcttattgggtacttcttaattattggaccatatagaatgcgatttgaaaatgcgacgaaggtaagtaagaagcaaattttttattttacgactggtattgttcttttatattttgtaaagggagggcctattgatttaattggccatattatatttagtgctcatatgtttgaaatggcagtcatgtatattgcagttccaccgttactgttgcttggtataccaatttggttatatcgttacattacttcttttaagttcgttcaaattatattaaaggcatttgctaaaccacttattgcgttgtttgtatttaacggcctgttttctttttatcatttaccagttgtttttgatacagtaaaacaaagtcaaatagctcatcctatttgtctcgctatattgttttttacagcaatcatgatgtggtggccgatgttaaatccattaccagaatatcaaacgttaagtgatataaagaaacttggttatatgtttgctaacggcatattattaacgcctgcatgtgcgttaatcatttttgcgacagccccgttatttgcaacgtatacggatccggctgcttggatgaaagcgatggaactatgtgtaccagcgggcactttatcagatttaaatataacgggaccagaatttttgcactggatgccagtcgtacaagatcagcaaactggtggtatcataatgaaaattgtccaggaaatagtgtacggtacaattataggctatgtattctttagatgggcacgtagagaacgtgaaaaggataaggagcagttgcaacaattgccgccgtatttacagattaagtaaaaaagtgtatgggattccatgcgctttttcttttttagctaccttaaaaagattgaattttctaactttttatgttaagttagtgtaggcgtgtactaaaagtggagataaaatttactactagctttcatgcgtaataattccatatgtagtgcaagttttttagagagttacaaatatatattgttatctttaataaacacgaactattttaagggggagtttaaatgggtagtagtggaagtatggtaaagccgattagtggttttttgacagcactaattcaatatccagtaccagtagtagaatcgcgtgcagacattgataaacaaattcaacaaatcataaaaacaattcattcgaccaaatcaggttaccctggtttagaattgatagtatttcctgaatatagtacacaagggctcaatacaaaaaaatggactacagaagaatttttatgcacagtgcctgggccagaaacagacttatttgctgaggcatgtaaagaatctaaagtatatggtgttttttcaataatggagaaaaatcctgatggtggagagccatataatacagcagttattattgatccacaaggtgaaatgattttgaagtatcgtaagctaaatccttgggtgccagtcgagccttggaaagctggagatttaggcttacctgtttgtgatggacctggaggaagtaaattagctgtttgtatttgtcatgatggcatgttccctgaagtagctcgtgaagcggcctataaaggtgcaaatgtcttaattcgtatttctggatatagtacacaagttagtgaacaatggatgctaacgaatcgttcaaatgcatggcaaaatttaatgtatacattgtcggtaaacttagcgggttatgatggtgtattttattactttggtgaaggacaagtatgtaattttgatgggactactttagtacagggtcatcgaaatccttgggagattgttactgctgaagtatatccagaactagcagatcaggctagattaggatggggattggaaaataatatatataatttaggttcaagaggatatgtagcaactcctggtggggtgaaagaaaatccatatacgtttgtaaaagatttagctgaaggtaaatataaggtcccctgggaagatgagattaaagtaaaagatggatctatttatggatatccagtaaaaaaaacgattcattcttagggaagggaaataaaacaagcgcatcatattgatgcgcttgtttttgttaatcaataatttgaaattcttttaactctttttcgacattttgtaggagttgttcgcttttttgaagtacattcgttgggaaagtctcatcatcaccatattcaacgccgtgaggataataatgttttcctaataagggggggagtagttttacttcagcgtgtctactgccaatgtcaccttcaacagcaactccttgcactcgtaaataataaacatcctttaatatttcaaatttataatcgtatgtaactcgttcataatcccactgtccggcaagtacgaagtggttgttttccatgatttcagttaaaagagttaattcaacgacggctccattaaatttcgtatttgtaaattgcatataatacctccttttttaatgttacaccattatttttataatagtatgaataataagaaagtgcaattcatattgagagaaaagggataatccagacttttttcacaaaaatatgatatagtgaaaagagtacggtacacacaaaaagaaagaaaaggatttgtgtatatctcaattttatgttttgttcaggaggtatatcgtttgaagaaattattgcgtatcgtaatgattacatttttaattttagctgttgatttatacgggaaattactcgtttcacaatatatattaaccccatctcaatcaaagcaagaaaataaaattgtgaaaaagaaaaagcaaattaaggaagactcctcagacactgttttaaatatgattggtgaagactctgaaaacctattagcgaagtggggagaaccctctcgaatagagccatctgcatacggatatgaatggtgggtatacaaccaggatttaactcagtatgttcaatttggagtttctgaacgtaaagttgtaacggcatacgcagctggtgaacaagttaaggttccaccttattatataaatgaaaaatatgaagaagtatataaaaaaagtccgctttcgcatgaaatttcattaaaaagagggaaaaatagttatcaatttgagctatctgataccgaagtcatggaacaaccgttaatacctgtagaagatggatgggcgcaattgtattttgatcaatttacacatgagcttgttggtgttcgttatatggatgatgaaactttattacgccaaagaccgtatcagctcgtttattcaggtgaattaatagcagaacaaccattgactccagaaaaaataaaacaagtagaaaatgggaatatgcaacaaatttttgatttaacaaatatcattcgaagtcgtcataaattaccattattaacatgggatcaggaaacagcagatgttgctgttggtcacagtaaagatatgaaagacaataattatttttctcatgactcacctacattaggtacactaggagatcgtttgcagcgcgggaaagtaggatttcaacttgctggtgagaacatagcggcgcaacatagtgatggaattgcggcagtgcaaggttggttaaatagtgaggggcatagaaagaatttattaaatgaacaatttacaggattaggtgttggtgtatacgataaattttatacacaaaactttattcgaaaataaagcgaaactgtaagcggtggggtgttacatcacctaattagttacttcgtattcactgaattgtaggtgggaatctgaccgtatgcaaatagcagaaaaaaaggtgcatgaatcgtctaaaaataggcgaaccatgcgccttttttttcttactatatagtagatatacatggagaggtgaggattatgccaacaacaaaaggaccgttacatccatcggttcaacagtttaaagaatttgtaaaccatcaccctaaaatggttcatgaggttagaagtggtcacaaaacatggcaacaattttatgaagaatggtacttacttggtgaagaagatccaatatgggcaacttatagaccggatggagcgcctgcgttttcttcggtaaaagaaaataaaaaagaaaaagataatcgaactgaagaggaaaaaactgctgatgtgatggggcaaatgctttctttttttaaaaagttggacgtggaacaaatgcagaaccatttagccaatgtgacgagtgcaattgggagcgtgcaacaagttattcagcaatttcaaggtaaccgtacgcagcaagagcaaagtacttcagaaaataacccgtttttctttcaaaaggattagggggaaagatgatgagagcagaaattatggagtttataaaggctgatgaggatttatctcgttatattagagagcaaccgtactggtatagaaaattaacacgaaatcctgaagaaaaagaggcttttgagttagcggcgatgcaacatttcaaaaaaacgataccagataaagtggaaaagtttcaaaatcaattggccgttgcttcgatcatgattgatatgtttcagtatatgaagcaacaaaacgcaacctaattggaagtgaaaaatatgtccgtcatgcagaacttttgttacaatagaagttgattatttaaaaaggagttgcagcatgacggaaatttgtttagtacgacatggacaaactgattggaattttcaagaaattattcaggggcgagaagatattccgcttaatgaagttggtaagaagcaagcgagtcaaagtgcagctgctttacaagaagaaacgtgggatatcattataagtagcccgttaattagagcgcaagaaacggctaatgaaatcgcaacggcagttggattacaatcgattttattagatgagcgatttgttgaacggaattttggagaagcttcagggaagccggttgcggctgttagagagttgattgctgagggtaaagtagaaggtatggagcgagatgaagagattgtagctcgttgctttgctgctttagaagatgttgcgacaactcattttggcaaacgtattattattgttgctcactcacacgcgataaaagcgattttacatgccattgaaccagatgaaattacatttaagacaccattaaaaaatgcgtgtattagttatgtgaaacaaaatagtggaaaatgggatgttcttaaatataatatagcggaacatattaatgtataagtgtgtacggatatagtgtaaaaatagttacgttatatctttcttttgagtaagtcacttcaattagtagttctaatctaaatgtggtatgatggatactcggaggtgtctctcatgattgtagcgacgctagaaagcgtattaatattagataaggcagagcagcttgcaaaagcgattatctgttcagatatagcagaagattatcgtaagtattatagagaattacatgaagatatggaacttcagacgctaattcagcaatttacagcgatgaaagaacggtatgaggaagtacagcgttttggaaaataccatcctgactatactaccgtgtcgatgaaaatgagagaattaaagcgttctgtggacttacatgataaggttgcagcttttaaaagagcagaaactgctttgcagaagttattagatgaagttagtgtagcaatcggttcggaagtgtcttcttccattaaagtgccaacaggaaatccattctttgatgctggtggctgtggtggaggttgtggtactggcggaggttgtggttgtaaaaaaacggggtgatgtaccccgttttttagaagttggaagaaaacgtatacagagtttgtcctgtaatgttataaatttctgattggttttcatagaatataaaatatatgtttttaaaaggagaagatggagaagattatgttcgggcaacgacaaagtatgattgtttatttacattcattgaaacatgccaagattttaaggaaatatggtaacatacattacatatcaaaacgattaaaatatgctgtagtatattgtgatatggaacaaattgagcatatgatgcataagttgaacaaacttccttttgtgaaaaagatagaacagtcgtatcgcccgtatttaaaaacggaatttgaaaattcccgtcctgatcgagcaaaagaatacgattatagctaatagaaaaaatcccctgctaaatttagcgggggatttttcacttgaaataacgtgttatttcatcggaggaatgaaattgttcattcgtaaaataccaattaaatgattaaaaaatagttctttttctgggaaagttgtagatggttttacagtaaaggtagccacttttttcccgagttgttctgccgtttcttcaaataaaatgacacgtttactttttttattttcaaatacaggaatgccttcacgacatatgtataatggttggaaatcaccagtagtagttggttttaatattacaacaagcgaacacacttttttatcgttttttatcgtttcaaattgtaacatatgtgctatacgttcttgatttgttttggcaatttcaagtaattcatataaatcagagtagccttctccaagttctataaagcgttgaatcatatcttttcctcctctttcttttactgtaccatttcactttttaaatgaaaagcacacaaagaaaaaaaaccctgcatagcagggcccttcttatactagcatgtactagtaagaaggcaaagggagaggagaaaccggaggaagaacttatggggaaacgtaagtcttctccgcggttggcaacaacatcgaaggtgatgttgttataattatttatgtccaatctaaatgaagatatacataatgaaattaaattttatgttgggctttttatttttcttttttttattttgtgataggataaaaaagataaagtggaactaatatacatattgggttcatattagtgaatgatgagatgaatacataaaaataacgagaggttatttgaggccgagtttttctatagttaggtgaatgtggtttgttaacggttaccgaagtgggaatggctttctataatcgctcgatagattgaaataaaggtagtgacaacagatgagagtagtttcaggaaaatgtaaaggacacccacttaaagcggttcctggtaatacaacacgtccaacgacagataaagtaaaagaatctatttttaatatgataggtccttattttgatggtggtatcgcccttgatttatttggtggtagtggtggtcttggaattgaggctttgagcagagggatcgataaagcaatttttgttgatcgggatagtaaagcgataaaagtaattcatcaaaatttagaaagttgtagagtacaggaacaagctgaagtatatcgaaatgatgctgaacgtgcagtaaaggcgttaataaaacgtgaaatgtcattcgatcttatattaatagatcctccatataaagagcaaaaaattgtatctttaattagtgtaatggatcaacatggattgctacatagtgatggattaattatggcagagcatggtaatgatgtagttttacctaattcaataggaaggcttgtaaaagtacgagctgagaattatgggattactgcaatatcgatttataagtatgaaggtgaggggacagaatgacaagtatagcgatttcttcaggaagttttgatccaattacccttgggcatctggatattattaaaaggggagcaaaagtatttgatgaggtgtacgtagtcgttttaaacaattcatcaaaaaaaccattcttttcagttgaagagcgattagaactaattcgagaagcgacaaaggatatcccgaatgtaaaggtagattcgcatagtgggctattagtagagtatgcaaaaatgcgtaatgcaaatgcaatattacgtggtttacgagcagtttctgattttgaatatgagatgcaaattacttctatgaatcgaaaattagatgaaaatattgaaacattttttattatgacaaacaaccaatattcatttttaagctcgagtattgtaaaagaagttgcgaggtatggaggaagtgtagtggatcttgtacctcctattgtagagcgtgctttaaaagaaaagtttcaaaccccgttaaagtgaacggggtttttctttatacgtgcgcaaaaataataaaataacatataagtatagacaaaataatgtaaaaattggtccataatgtataaaagatgtccaaatttcatgtagtatagaaggatgctcggataaaaatacaggaatatcttttggcataggtgagaaagaactcactttctcataaaatggtgtccaaaatacaaatgtaaaaataggggcaagaatactttgaataattcgtgcgaaaaaatagggtttaaatcggatatctgtttcagctaatatactagcaacttgtgcctgaatagaaaggccgctaaatgctaaaatgaagcttgttaccatagcttgttgtaagagcggtgtttcatttatttgactaatcatttggcttccgagtgtcatttcgaaaatacctgataatataggtatactaaaatctgtacttagttggaagaatgataaaatatgttgcataataaaagaaagagctgctgtaatgtggaatacagtaatcattttatttaacacagagaataaaataataaatccgccaatcataagtaatgtttgaatagaagaaacaatggcatccccaagtaatttaccaattggtcttttttcttgtaagcgtgtctcgtgaagaattaaaaaagggttttgaaagcgacgtttttttgtagtgtgtgtattatttttgtaagcggtattatcgccgtaaaaacgcataattaatccgacagcaaagttactgaaataatgggcagcggctaatataattcctaatttcggattattaaaaaagccgatagacacagcaccgaaaataaaaagtggattggaagaatttgtgaaagaaacgaggcgctccgcttcaatctgagttaaaagattgctttttcgtagtctagcgcttaatttggcgcctgcagggaaaccagaagccattcccatcgcccaaacaaatccgcctatccctggaacgcgaaaaagtgggcgcatgagtggttctaatataacgccaataaattttacaacaccgatactaattagaagttccgcaatgatgaaaaacggtagtagtgaagggaatacaacttcccaccatatatttaacccgcgaatagaagcttgcaaagcggcttgggggtggagtacaagagaaaaggttaaaaatagcgttgatatggtaaggaaagcggttttccatttttcatacatgtaagtaaatccccctttgtcccaaaaaacgttcatttcagtatacgtggatacgtagtgaatttagaccataagtatgaaaaaggaatgaaaaaaattaaagggtgagaaaaatgaaagaaccaaagattggtttagcgcttgggtctggaggagcgaaagggtttgctcatattggtgtaataaaggttttaagggaagcgggtatccctattcacatgattgcaggaagtagtatgggggcgctaataggtacgttttatgcggcaagtagtaacgttgaaagattgtataaattggcatctgtttttaagcggaagtattatttagatttcacggtaccgaaaatgggatttattgctggaaaacgtgtcaaagatatgattaaaatgtttacatataataaaaatttagaagagttagatatcccgacggctgttgtggctactgacatattgaagggggaaaaagtggtttttacaagtgggccagttgcagatgcggtgagggctagcatatctgttcctggagtgtttgtaccagaaaaaatagatggaagattattagtggatggtggagtcattgatcgcatcccagtatcggttgtgaaagagttaggggccgatattgttatcgctgttgatgtatctccaattaaggtgaatggcgatgttacgtccatttatgacgtaatcatacaaagtattgaaattatgcagcatgagcttgtaatgaatcggcaaattgcatcggatttaatgatgcgaccagctgtagagcaatttagttcacgtgcttttacaaacattgaagacattattcgagttggagaagtagaagcagaaaaacatgtttcaaatatttatttattaattgagcagtggaaggagaaacataatgtttaagcgttttcggtttatatatgcaatcttaataggggttatattggcgatgttacttgtttacgtacgtttaccgtattatataacaaaaccaggaatggctgccaaattagagccttatgttcaagttgagggtggaacgaaagaatctggtgattttatgcttgttacggtttcaatgggaccagcaaatgtggtgaatttaatagcggcacagtttaataaatatacacatatttcgaaagcggaagaaatattgcaaaaaggtgagagtgatgaagaatatcaatttcgccaaaattatgcgatgaaagattcgcaaaatgcagcaatttataatgcatataaacgtgcaaatcgctcagtatcttttgaaaataaaggtgtattagttgctggtgtggcaaaaggaatgccgtcagaaggaaagcttaagcttggtgatgttattatagctgttgacggaaaaacatttgaaaagacggagcaatttattgaatatatgacagggaaaaaagaaaacgatgctgtaagtattgagtacatgagaaatggaaaacaattgaaagagaatttaaatgtaaagacgattcctaatgggaatgggcgtgtcggcataggtgtttctatcgttacggaaagagaattagtggtcgatccgaaagtgaaaattaattctcatgaaattggtggaccatccgcaggtttaatgttcacattagaaatatataatcaacttgtggaagaagacttaacgaaaggacatgaaatagctggaacaggtacaattaatgaaaaaggagaagtgggcccaattggtggtataaatcaaaaagtggtggctgctagcgatgccggggctgaagtgttctttgcgccaaatgaaaaaggtgcggagaaatcgaactataaagatgcacttgagactgcaaaggatattaaaacaaaaatgaaaattgtaccagtagatacgctggatgatgcgttaacatatttagaaaagatggataaggaaaaaacctctctgaaatagagaggtttttttataggaattttgtagttgtttcatcatagcgaacaggatggtgtgttatatcctgttttaatagttgtgtgcgtaacggttcgtgcatgatggagaaatatacagagtttgcttttttctctatatctaaagcggcatggtcgaatgtttttgtatgagtaaggattggaagttcgatttttttcttgttttttgaaaggtaagtttgtcctttttgtgacatacctagcaggcgaatatatggtgcgtgttgttctatatttgcgctacgtatttcctcttttgttgtgtttgttaaaatgtgtgtacaagctctttgtaatctagtccatgtataacgttttgtttttaatgcttccatgaatgaatagaaggaggaactgttttgtatttttgataaaatacgatgctctaaaccttcttctatttcatatatatgtcgtaagtcccctggagacatcgtcatgagtctatatttaaaaaatgaaaagtattgttcccaattatgtaatatcccgtaattttgtttgtaatttgctaaaagcgaagtggttgcctgtgggagaaaaggttcaattgttgtaaatgatccttcttcgctaaagagttgttttcggatgcttgtcgcgcttgcaatatgttggtcattaaatgtttcatcatgataatgagaggcaaatctttttatagtttgagcttgtatagagctattttgtgacagaattgctttcatatattggaagcctaaaatattatttggttgtgacatatctatgtttttttcagatgttaaaatgtgtgagaaagcatccgatgttgcttttgcataactattaccagcgtccatgaattgttttacaaggtagttaaaagtctcttcttcgtttttttgtacggagatggtattataaaaattttcgatttgtccatcctcactaccgaaacaaatttcagaaacacgtagggcatttaaaatggaaatagcaccatttgcgaaggtttcagccttttgtgttgcaaagacgtatggaagctctacaacaaggtctacgccgtttgctaaggccattttagtgcgataccatttggaaatgagtgcgggctcaccacgctgtaaaaaaggaccactcataacggcaattattatatcggattgtgttaacttttttgtctgttgcacatgataaagatgaccgttatgaaaagggttatattcaacaactataccaccagcttttatggtaatctctcctttcgatgtagcatctttttgaaaaacgtgatactctatatattatttactatgatgacttcattatagtgtaaagaaaaaacattgacaaatataaaatggctagctataattttgtttgttgccttgaggtgatatgatatgaaatggtccatccatcaattgaataaattgagaaataaaggattgacattggatgagatggtagatgtaagtgagctaaaagaggtcgagaaagatattcgtgaaattaatcctgttcatgtaacgggaagagttgattttggctccggtaagtttacgtttcatctacatataactggaagcatggttttaccatgttctcgctctttagtagatgtgacattaccatttgacattaaaacaactgaggtgttccaaacttcacaagaagaatttgaaactgaagctgaaattcattctttagaaggagaagtacttgacttactgcccgtaatcaaggaaaatatacttttggagattccaatgcaaattttcagtgatgatgtttctggtggagcaccgatgcaaggtcaagactggcaagtgatttcggaagaagacaaagaaaagactgttgatccaagattggcaggacttgcaaagttttttgacaaataatcggaagactggttcaggccttcatatgaaaataactatttcttttaaggaggtgggaagaatggctgtaccttttagaagaacttctaaaacagtaaaaagaaagcgtcgtacgcatttcaaattatcagtacctggtatggtagagtgcccaagctgtggtgaagcgaaattagctcaccgtgtatgtaaagcatgcggtacttacaaaggtaaagaagtaatcagcaagtaattgcgggaaaataaacgcagaagatatcttctgcgtttattttttttgtcttaatctttagttgttgtattctatcttttctagtaactgcatatgcttaataaaaaatgcatagggaggactagagagatggcgacaacaagacaagatgcttggactgatgatgaagatttgcttctggcagaagtagtactccggcatattcgagaaggtggaacacaactttctgcctttaaggaagtggggaaaaatttatctcgtacaccagcagcatgtgggtttagatggaattcttacgtaagaaagcaatataaagaacgtattgaggaagcaaagcaacttcgtaaagtagaaaattatgaagtgaaagagacaaaggtgttagaacctacgtcaattacgttgaatgatgttattgatttcttgcaaaattataaagatgaaaactctttaacggtgttgcaacaacaagttgaatcattacaaacagaaagagagcgtcttctggagcgattatcagtatatgaagaagagtatagaacactacttgattatatcgatcaaaaaagaagtgtaatggtagcggaaagaaacaatgctcgctcgaatgagaagttagagaagcttaagaaataaaaaacagctgttatacagctgtttttttatttcttaagccgattcttcgtttgtaaccgcattcaaatttgcttctggatgccaaatataaaaatctccatcagttactgatacggggttgaaatttaatttatcccaaaaaccagctgaatgaatacgtgctatcgttttaataggaaattgcatttgtttcgcatgatttacaagcatttgcccgaatccttgtttttgaaaagttggtaatacttcaagtttataaagttctaggtagggacctgtaatttcgaatggttctccgccgtttcttttcatatatagactcatacgtgcgattagtgatccgccataataaataccgtaaaatggagattcactgtcgttttcaataatgtttgcttgtaattcttccagcatagatagttcctgggctccgcaccctttaaattttttgaattcatctaacgttttataattgatgagcaagcgctcaacttttgggaatcccattacatcacatccttttcttgtctcgttgaatgcagaaaagtaaaaatatttataataatagtataactcatttttttatttttatgaagaagatagtatatttctttttttatttttttgaggatttgctaaactaagagtagaagcgtattaataggtggtacatacatagtgaaaaatgagagtatatttgttgggcagaggacagcggaattatagggcgtgctcaggtgctttaaaaagatataaaggggggaaggcaagggcacttagtgtgaattccttgtgtgaaaatgaaaattggaattgtcggaccaggtgctattggtctattgtatacattttatttacaaaaaaataaccaagatgttacgttgtttacaagaacagctaagcaagctgaagaattaaatgaaacaggtgtaacttgtattagagatggaagatgtgaaacagtatatccatctgttttaccgatagaaagtatggtagcgcaaaatttagattatatatttattgctgtgaagcaatatcatatagatgacgtactaccgtttgtggaaggggcatcatcattaatctttttgcaaaacggaatgtcgcatcttcaaaagatgctgaacatagggagtaaaaatatagctgttggtattgtagaacatggtgcgaaaaaagagggagggcatatcgttcatcatactgggataggggtaacaaaatttggagtggtttgtggtcaatctatacattttaaaaaaatattcaattattttcctgttgcttattttccagttcaaatagaaacggattgggaagagattatgcataaaaaattagtagtaaatgtatgtatcaatccgttgacagcactattgggagttaagaatggtgaattaatcacgaatcgttttttttatcaaatgatggagcaagtgtttcaggaggcagcatttcttattagaggagaaaaagaaatggtatggcaaatggtacgaaatgtgtgtgaaggaacgtctcgtaatacatcttctatgctagcggatgtaagagcgagtagaaagacggaaattaatgcgattgttggatatgtattagaagaagctaagaaacagcaacgaccagttccgacacttcaatttttgttcgatgcaataaaaggtttagaaacaagagtataagtgttattctttgcttttacgtgaaacattgactacaatgtggattggtgagagaactggatacgaaaggaagaattatatggagataaaagaaatctctgttccgcaacaaggtattgtagcggactatatgaacggtaaaaaagagatacagtcatgttttgattatatgttaacagaagatgcttttaaacaacgtttacatgatttgcgtgaaagggagtttttccgccaagatttagtagcgcatttattagaatataatacaaaattacaagcgggagaatctacacttcaaaatgtaaaagcgcttggagatgaaaatacatatgttgttatagctggacaacaagcggggttattaactggaccgctttatacaattcataaagttatttcaattttacagcttgcaaaggaaaaggaagaaagtttaggagttaaagttgtccctgtcttctggattgcgggtgaagaccatgatatggatgagattaatcatacttttgtagcgaaaaataaaaagatgaaaaaaactattttttatgaccgtaatccgaaaaaggcaagtgcttctgagtctgaactttctgttgaagattgtagaaattggattgaagagatttttaaaacatacccagaaacaaattttacaaaagatgtattaaaatttgttgatgatgctttgaaaaaatcgaatacgtatgtagatttctttgctcatcttattacgaaaatctttgctaattctggtttaatccttgttgattcacatcatcctgaattaagaaagttagaaattccatttttcaagcgaattataagtaagtataaagaggtacaagagggccttcgtaatcagcaggaagtaattaaagaactaggatacaaaccgattattgaaacgaagtctcatgcagtgcatatattcatggaaatagataatgaacgagtattgcttgaagagcatcaaggtaagtttgttggaaaggatggggcgcattccttttcatacgaagagttgattgaagagatggagagaaatccggcacgttttagtaataatgttgtaacacgtcctcttatgcaagagtatgtatttcctacgctcgcatttattggaggtccaggggaattagcttattggagtgaattacagcaagtattccatactgtcggttttcaaatgccacctgtcgttcctcgtcttacaattacttatgtggagagagatatagcgacagatttattcgatctgcaattgagagaaattgatccgtttttaaatgatgtcgataaactgcgtgaaaactggttgtttaatcaaatagaggaaccgattgatgatcattttgaaaaggcgaaaaaagaaattgccgatattcatacatctttacagcaatttgtaaagaaaatagagccagggttaggtgcgtttgcagggaaaaacgaattgaaaattaatgaacaaattgaactgttggaaagaatgttgaaaagaaatgttgagaaaaagtatgaggttcagctaaataaattccgccgtatacaattcgcacttcgtccattaggtgcgccgcaagaacgtgtgtggaatgtatgttattatttaaatcagtttggtttggatttcgttgatcgtgtaatggaaaaccctttttcttgggacggaaaacatcatgttataaaactataaaatcttgctctttggagcaggattttatttttattccgttgaatttactgtgaagtgatttttttctgaattatcaatcaaaaaaatgttagatatggcaattgtgttggatacttaaatatatgacaaaatagcacaaaatgtaaacgtattattcgctttttcgacagttttttatttaaattcccgcaaaagatgataaaatttagtatataataaaagaaaatagcgatttgtatagtatgttgcctttgttggtaagttaaatgagtcgttctttcgtattatttcattctctaagcgtgaaatatgtgtttagaggaagggatacattcaacataattaattggaaaaagagtaggtgcaacaatgtttaaacacgtaacagtgcttttaaaggaaacagtagacggcttagatataaagccagatggtacatatgtagattgtacactggggggaggaggacatagttcttatttattatcccaattaactgaaggtggaaaattaatagcgtttgatcaagatgagatagcgattcaaaacgcgaaagaaaagttctcttcatacggtgaacagtttataacagtaaagagtaacttccgttatttagctgaaaaactgcaggaaataggtataacagaagtagatggtattttatttgatttaggtgtttcatccccacaattagatacaccagaacgaggctttagttatcatcatgatgcaccgctagatatgcggatggatcaagatgccccattaacagcgtatgatgttgtaaatagctggtcatatgaacaacttgtaaggattttcttccaatacggtgaagagaaattttcaaaacaaattgcaagaaaaattgaagcttatcgtgagaataaagctattgaaacgacaggagaattagtagagctaattaaagaaggtattccggctccagctcgtagaacgggtgggcatcctgctaagcgagtgtttcaggcaattcgtatagctgtaaatgatgaattaaaagtatttgaagaagcattggaatctgctattgagatggttaagccaggtggaagagttagtgttataacattccattcattagaagatcgtatttgtaaaacaacgtttaagcgaaatagtacaacgccacaattgccgccaggattaccgattattcctgatgaatttaagccgaaattaaagcttattacaagaaaaccgattttaccttctgatatagagctagaagaaaataatcgtgcgcgttctgcgaagttgagaatcgctgaaaaacgataaaagggagagagaggtatgactaatttagctgtaaagtacaaacaacaagcgcaagaagaggtgcaaattcaaacgcccccacagcagatggctaagccgaaggttaaagcgaaaattacaagaatcgaaaaactgttgtatgtagcgtttattggctttttattgtatgcctgtgtcgcgtttattggaaataaagcaggcctttatcaagttaatgtagaagcagcgacgatagaagaaaaaattgtacagcagcaaaaagaaaatcaagaattacaagctgaagtagagaagttaagtcgctatgaacgaatcgctgaagttgcaaaaaaacacgggctagaaattaatgcgaataatgtgaaaggcctcaaataaggcaataggtgtgaaggaacgatgaagaagaatatgactaaatttcataccaataagggagcaggttattttatgatatttttcctcctgctctttttgctgttattagcccgatttttttacatacaatcaacaggaacagttcataatcaggatttagatgcacttgctaaacaaaagcatagtaaaaaaggagttcttgaagcgaaccgaggaaccatttatgatcaaaacggtcatgtgttagcgcaagacgcaaactcttacaaaatggtagctgcactaaaaggtgctaactcagttgagaataaagaagatactgcaaagaaaattgcaggagtacttggaaaaggcgaagaggatattttagcttctttaaataaggaaggtagaagtcaagtcgaatttggaacgttaggcaaggatttgacgaaagaaaagaaggaacaaatagaagcgttgaagttgccgggaatatcttttattacagaaaatgcaagggtgtatccaaacggtgattttgcatcttacgttataggtcatgcaaaaccaaatgagaatggaacctcggtaggtcaatttggcatagagaaaagcttggataaatacttaagtgcctcgaacggagaagtagcatatacaggtgatcgtaaaggtgtgtcccttgatgggggaaaagttaatgtaaaggcacctaaaaatggagataacgcttatttaacaatcgatcaacgtgtccaaagttatttagaagacgcgatgaaagcagcaagtaagcaatatgagccagaaagtttaatagggattgttgcagatccgaaaactgggaaaatattagcgatgtctactaaacctagttatgaccctaatgatcgtcaaattaaatatttctttaatgacgcaattgccaatgcatttgaacctggatcaacaatgaaaattttcacgttagcggcagctattaatgaaggtgtgtacaaaggccaagattattatcagtccgggacatatcaagtcggaaataggaaaataaaagatcataacggtggtgctggttggggctctatcacgtttgatgaaggggtagagcgttcttcaaacgtagcgtttgcaattttaggagatcaaaaacttggtccagaacgtttccgaaaatatattcatagttttggattagatgaaaaaacgaacattgatttatcaggtgaaggatcgaatacaattttatttgatcagcaaatacaacaagtgacaacagcttttggacaaggttccactgtaacaccaattcagcttgtacaagctgcaacggccattgcaaatgatgggaaaatgatgaaaccttatgcaattgataaaattgtagatccgataacagacaaagtaaaattagaacataagccagaagaagtaggaaaacctgttacaaaggaaacagcagcgcaagtaagacaattattagaacgtgttgttacatctccgaaaggtacagggacagcttataaaattgatggatattcagttggtggtaaaacaggtacagcgcaaattccggatggaaaaggcggctatatgacagggagacagaattatatattctcattcttaggtatggcaccaatggacgatccacaacttgttgtgtatgtagctgttaaacagcctaaattaaaagatgatgagaacggtgcacaaccgttagctgatatttttaaatatgtaacaaaaaatagtttagagtatttaaagattaagccaaatgaagttaaagatccgaaaaaacatctgaaagaacaacaaactactgttccggatgtaaatggtaaaacgatggctgaagcggggaaagcgattgataaagcaaaacttcgtccaatcgtactaggtgaagggaaagtacagcaacaagtaccaaaagcgactgaacaaacattaaaaggcgaccgagtcttcttggtaggagataagcctacaatgccaaatatacaaggatgggcactgcgtgatgttatgaatttagcgaagacattacagcttaacttgaaaccttctggtacaggatacgtaacagaacaaagtgtggcggaaggaacattattacaacctggtacagaattaggtgtcacactcgtaccgccactcgaaccacagcaagaagcagaaaagccgtaatggtaaaagagaataagttctaattaaataagtacaagcatatattggaacaagctaggcgtaagggaggcttgttccaatatgcgtgtatcaaatgtaacagttagaaaacgacttatttttatacttatatcaggtatacttattttcacgattatcgatattcgtcttggatatgtgcaattttttcttgggaatatgttaacggatcgtgcgaaagattcatggagtcgtaatattacttttgaacccgaacgtgggaaaattttagaccgaaatggtgtggaacttgccacgaataaaagtgctccaactgtctttgttgtaccgaggcaaattgaaaaaccagcggagactgcagagaagttagctgcagtattaggtgtggaaaaagatgagatttataaaaggattacaaaaaaagaatcgattgtaaggttagataaaggcggaaggaaaatatcacatgacaaagcgaaagaagtacgaggattaagtctgaagggcgtgtatatcgcagaggattctatccggtactatccgtttggaaactttttatcacatgtattaggttttgcaggtagcgataaccaaggtcttatgggactagaaaaatattatgataaagagctaaatggggacaaaggtcatgtgcgtttttttgcagatgcgaaaggacaaaggatgcctaatgttggtgatgatttcaaaaagccagaagccggtttaaatttaggattaacaatcgatgcgcgtattacaaggattatggaaagagaaatgaatattgcggagtcaacttataatcctgacggtatgattgcgattgcaatgaaccctaaaaatggtgaagttttagggatgtctagtcgaccgagttttgacccagcggattttcaaagtgtctctccagaagtgtataacagaaatctacctgtatggagtacgtatgagcctggttcaacatttaagatcattacattagctgcagcattgaatgaaaatttagtagacttagagaaggatacgttttatgatgatggagcagctgaagtaggtggagctagattgaaatgctggaaagcaggaggtcatggcagtcaaacgtttttagaagtcgttcaaaactcatgtaacccgggatttattgaacttggtgatcgccttggtaaagaccgattatttaaatacattcgtaattttggttttgggcagaagactggaattgacttgcaaggtgaaggcagtgggattttatttaatttagataaagttggtccagtagagcaagcaacaacttcattcggccaaggagtttctgttacgccgattcaacaagtagcagctgtagcggcggctgtaaatggtggaacattgtatcagccgtatatagctaaggagtttattgatccgaaaaataatcaagttgttagtaaaaagacacctgttgagaaaagaaaagttatttccaaggaaacttcagaaaaagttcgttatgcattagagaatgttgtagcgaaaggttctggtaaaggtgcttatattgatggatatcgcgtaggtggaaaaacgggtactgctcaaaaggtgaaggatggtaaatatttagagaataattatatagtatcttttatcggatttgctccagcggatgatccagagattgttgtgtatgtagctgttgataatccaaaaggggttacacagtttggtggagtggtagcagctccgattgtcgggaatatccttcgagatgcgcttcctgttatgggagtgaaaccgagaaaagaacaagttgagaaagaatataaatggggcgatacaccaactgtggaagttccgaatttaattggaatgaaaaagaaagacttacaaacacaactcgtcgatttgaagcttgatataagtggagatggagagaaagtaattaaacaatcaccagaagcgggagctaaagtaaaagaaggctcaaaaattagaatttacttcgggaattaaaggtaacatagtacgttttatggtacaattggtggaagtgagttctttatagaacagttacttaatttgagacagtaagtgtctcattcataaataggtcagtagcacttacctccttatataggaggtaatgtgttgcttactgaaaaaagataaataaacaatgtagagagggtttagtgaaatgaagttgcatacacttgtatcatgtttgcatgattttccagttgttccaaaagaaaatccagaaatcacatctatagaagctgattcacgtaaagtgaaagagggaagcttatttgtatgtatgaaaggatatacggttgatagccatgattttgctaagcaagcagcggcacaaggagcggctgctattgttgcggaaagaccaattgatgttgacgttccagttgtacttgtgaaaaatacttttcgttcgttagcggttttagctgattatttttatggtcaaccgacacacaagttacatttaatcggaattacaggtacaaatggaaagacaacaacatcgcatattatggatgagattatgcgagcacatggtcataaaacagggctaattggaacgattaatatgaaaatcggtgatgaaacatttgaggtgaaaaatacaacaccagatgcactaacacttcaacagacgttttcaaaaatggttgaacaaggtgtggacagcacggtaatggaagtttcgtcacatgcgttagatcttggtcgtgtacacggatgtgattacgatgtagcggtgtttacgaatttaacacaagatcatttagactatcataaaacgatggaagaatataaacatgcaaaagggttactatttgcacagcttggcaatagttataatcataatcgtgaaaagtacgctgtgctgaatagcgatgataatgtaacagaagagtatatgagaagtactgcagcaacagttgtaacatatggtattgatacaacaagtgacattatggcaaaaaatatcgttatgacgagtggcgggactacatttacgcttgtcacaccatatgaaagtgtaaatgttacgatgaaattaataggtaaatttaatgtatataacgtacttgcagcaacagcagcaggacttgtttcgggtgtgaaattagaaacaatcattgctgttataaaagaactagctggggttccagggcgttttgaagttgttgatggaggacaaaattatacagttattgttgattacgcacatacgccggatagtttagaaaatgtattaaaaactgcaaaacaatttgcaaaaggtgatgtgtattgtatcgttggttgtggcggcgatagggaccgaacgaagagaccgataatggcaagtgttgcaacaaaatatgcaactcatgcaatttacacatcagataatccaagaagtgaagatccagcggctattttagatgatatggtacatggtgcaagtgggaaaaattatgaagtgattattgatagaaaagaagcgatacaccatgcaatcactaaagcgaaagcagatgatatcattattattgctggtaagggtcatgaaacgtatcaaattattggtaaagaagttcatcattttgatgatcgtgaagttgctaaagaagcaattaaagggcgtttaagcaacgaagagtaacaacgtgagaggaggactacatgtgcttgagcaaggtttattagtaacggctggggtagcattcttaatttctgttgccctttcgccattgtttattccatttttaagaaaattaaagttcggacagagtattcgtgatgagggaccaaagtcacatcaaaaaaaatcagggacaccgacaatgggtggtatcgtcatatacgtatctatgatggtaacttcacttattatggcgattaagtttaattatttaggtgcagaggtttcgttattactattagtgacgtttggttacggcttgattggatttttagatgactacataaaggtggttaagaagagaaatcttggtttaacatcaaagcaaaaattagtaggtcagcttgttattgctattgcattctttttaattggaaaagggcaagcgttccacacatacatcatgattccgggaacggatgttaagtttgaattaggttgggcgtatttcgtacttgtactatttatgcttattggtggatcaaatgcagttaacttaactgacggtttagatggtttattatcaggaacagctgctattgcatttggagcatttagtattattgctgtggcacaagagcaatttggagtggcgatattctgtatggcagttgtaggagctgtacttggatttttagtattcaatgcgaatccagcaaaagtgtttatgggagatacaggttcattagctttaggtggagccattgcagctgtagcgattttattaaaacaagaattgctacttgtaattatcggcggagtattcgtaatggaaactttatcggttatcattcaggtcatttcatttaaaacaacaggaaaacgtgtctttaaaatgagtccattacaccatcattatgaattatgtggttggtcagagtggcgtgttgttgtgacgttttggtctgcaggatttttattagctgtgttaggaatttatatcggggtgtggatgtaattgaaaactgtaactgaatttcaaaataagaatattcttgtattaggcattgcaaaaagtggttatgcagcagctacattgttacaaaagttaggggcaaatgttattgtaaatgacggaaagcctttagcagagaatgtacttgctgcagaattacaagcaaaaggaatggacgttgtatgcggtggtcatcctttagaattattagagagaaatatttctcttgtagtaaaaaatccaggaatcccgtattctaatccaatattagttgctgcgaaagaaaagcaaattccgattgttacggaagttgaattagcatatcgtatttcagaagcaccatttgttgggattacggggtctaacggtaaaacgacgacgacaatgctgacatttgaaatgctaaaagaaggacaaaagcatcctgtaattgcagggaacattggcactgtagcgtgtgaagtagcacaggatgcaaaagaaaatgaagttgtagttacagaactttcatcatttcaattgatgggagtagaattgttccaacctaaaattgctgcgtttttaaatttatttgaggcccacttagattatcatgggacgaagaaagaatatggtttagcgaaagcaaatatttttaaaaaccaaacagaaaatgattatagtgtaataaatgcagatgatgcagatgtgatggctttgtctgcgtattctaaaggtcaaaaaatcctgttttcgacaacgaaagaaattgaagatggcgcgtgtataaaagataacgctctttatttcaaaggtgaaaaagttgttgaagtaagcgatatcgttttacctggtcaacataatttagaaaatattttagctgcgatgagtattgcgaaattattaggtacttctaatgaagcaattacggtcgtgttaaaacgttttacgggtgtaaaacatcgtttagaatatgtaacaacgattaacaaccgtaagttttataatgattcaaaagcaacgaatatgttagcgactgagaaagcactatctgcgtttacacaaccgattgtgttactagcaggtgggcttgatcgcggaaatgaattcgatgatttaattccgtatttcaaaaatgtaaaagcgattgtaacatttggacaaacagctcctaaactagtaagagcggcagaaaaagcgggattagatataattgaaagtgtcgatactttagatgaagcagtggtgaaagcttatgctcattctaaagatggcgatgtcgttcttctttctccagcgtgtgcaagctgggatcaatttaaaacatttgaagaaagaggagacatttttatacaagctgtgcataaacttatataaagtaaatcaaaacatcagtaggctaacacctactgatgttttgttacatagggcaaaagtttctgcctaaagaggtggtgtttgtgggtaatgaagaaaacgcctgattttattctcatcatcgtaacactttcattgttgacaatcggaatgattatggtttatagtgcgagtgcagtttgggcctcttataaaatgggggactcattcttttttgcaaaaagacaattactgtttgcgggtcttggtgtagtagctatgttttttattatgaaaattgattattgggtgtggcgtacgtattcaaaagtgattttgctagtttgcttcattcttcttattctcgttcttattcctggagtaggtcttgttcgaggaggagcacgaagttggattggaatcggagcattttcgattcaaccgtcagaatttatgaagtttgcgatgattattttcttggcaaagtttttagcagaacggcaaaaattgattacatcttttaaacgtggtttattaccggcccttagttttgtgtttcttgcttttgggatgattatgttacagccagaccttgggacaggaacggtaatggttgggacatgtatcattatgatattcatttcgggagcgagggtctttcactttgcaatgtttggtttgattggtgtagcaggatttgtagggttaattgcatcagcaccgtatcgaatgaaacgcattacatcatatttagatccgtggtcagatccgctcgggagtggatttcaaattatccaatcattacttgcaattggacctggtggattatttgggcttggacttggacaaagtagacaaaaatttctttatttacctgaaccacaaactgactttatatttgcgatcttatccgaggaattaggttttattggtggttcatttgtgttattattatttagtctattattatggcgcgggattcgtatcgcattaggagcgccagatttatatggtacgtttttagcagtaggtattgtggcgatgattgcgattcaagtaatgattaatgttggtgttgtaacaggactgatgcctgttacgggtattaccttgccgtttttaagttatggtggatcaagtttgacattaatgttaatggcagtaggtgtattattaaatataagtcgccattctcgctactaaaccctgtttataagacagggtttttcgtatgtgtgtaaaaatgcaatatgtatatagaaataagtataatggaaataagaaaagagaagcggaggagttagtagtgcgtgtattagtgagtggtgggggtactggtggtcatatttatccagctcttgctttaattagagaaataaaaaagttaaatccagaagcgagatttttatatattggtacggaaaatggactagagagtacaatcgttccaaaagcaggtataccatttcaatctattgttataagtggatttaaacgaaaaatatcattagataatgtgaaaacagtaatgcgttttctaaaaggtgtacaggatagtaaacgatacattcgtcgttttaatccggatatcgtaattggaacgggtggatatgtatgtggaccagttgtatacgctgcagccaaattaggtattccaactattgtacatgaacaaaatagtgtaccaggtgtaacgaacaagtttttaagccgttatgttgataaagttgctgtttgttttgaagcagctatagagcattttccagagtcaaaagtggtaatgacaggtaatccacgagcatcagaggtaatggatcaaaatggaatgaaggggaaacgttcagttgggctttctcttcctaaaaagtctgtacttatatttggtggaagtcgtggggctagaccgattaacgatgccttcgttgaagcaattgaacagtttgggaacaaaagctacgaaatactatatgtaacgggtgaagtacattatgataaagtgatggaagccgtgaagcaaaaagggaacccaagcaatgttattattaagccgttcattcataatatgccagaggtactaactggtgtagaccttgttgtttcaagggctggggcaacaacacttgcagaattaacagcgttaggaaaaccaagtgtgttaataccgagtccgtatgtaacaaataatcatcaggaaaagaatgcacgttcagttgttgataaaggagcggcaaaaatgttacttgaaaaagatttaacagctgaaacgcttattcgtgatattgatgagattttattgaatgcacaaacattacaaaatatgaagctagcggctaagcaactaggtattccagatgcagcaaataagctgtatgaagtaatgaataagcttgtaaaaaaataaagtgaggctttaattagtggggagtgattctctctcgttgattattatctttcactaatcggatgtttactgacatcctgattccgcctaatttctttgttatcgccgaattttgatttaggagctgtactgcccgtaaatagagggataacgttaggtgaacgccctgcatattattgtcataaggagacttaatatgggggagattgtctatggaacaattagtaaatgagcttatagaagcagacgttggtcgtgttttagttaacgagccgttagcacgttatacaactatgaaaataggtggaccagcggatattttaattgtgccaaagcatgtagccggtattgaaaaaacattacagttagtaaagcaatacaaaacgaagtggactgtaattggtcgcggttcaaaccttcttgtatctgatcaaggcatagaaggtgttgttattcgtttaggagaaggattagatcacttagaggtcgaaaaacataaggtaagagttggtagtggatatcctcttattaaattgtcaactttacttagtcgtcaagggttagctggattggagtttgcgagcggtattccaggaagtgtcggtggtgcagtatatatgaatgcaggtgcacataaatcggatatatcgagtgtattatcgaaggctctcattctgtttgaagacggtacaattgcctggttaacgaataaagaactggagttttcttatcggtcatctgtattgcaaacgaaacgtcctggtattgttttagaggcggagtttcaattacaggcgggaaaacgtgaagaaattgtacgtagcatgcaaaataataaagactaccgccgtgaaacgcaaccatggaatcatccgtgtgcaggaagtatatttcggaatccaatcccacattttgcaggagatttagtagaaaaagcagggcttcgtggttataggattggtggagctcaaatttctgaaatgcatggcaattttattgttaataccgggggagcttcagcgcaagatgtaatgtctttaattgaattaataaaacatacaattaaggataaatttgatgtagatatgcacacagaagtagaaatcattggaagataacggttattcgttccgctcattatcatttatgttataataagaagataagaacggcatgaggaacatgccgttctttatgttacatagggggatcgtacatgaataatagtaaagtgattaaactacaagatcgtgtaccaaaattgaaaaatcaaaagaaaaaaaacaaaaaaaatgttaatcatcgattgattttatacatatcaattttatttttattagtgctctttttaatttattttcggtctccgcttagtaatataaaaaagattagtgtgtttggaaatcactatatgacggatgagcaagtaatgaaggattcaggcgtgacatatgatacaagttatttccgagtgacagcacataaagctgaagaaaacttaacgaagcgaaaagaaattaaagcagtaaatgtaaaaaaacgttttccaaacaagattgatattcatatcgaagaatatttaacgattggttatataaataaagagggaaaactacaaccgttattagaaaatggaaaaacgcttgatgtactacctaatggaaaacttcctgttgcagcaccgattttcgaaccttttaaagaagagaaaatgaaggagttaatcgctgaactagaaaaattaacaccagctattttaaaatctatttcggagattcgctattcaccaacaaatgcgaatgaagatcatcttactttatatatgaatgaaggttatgaagtgagcactacgattcaaaatttcgcaaaacgtatggaagcctatccacttattttaaaaacaattgagccaggtaagaaggtattaattgacttagaagtaggtgcatatacgaaagaattaggtgcggaagacaaaaaagaatagaatggtagttttcgttgcttatagcagaaaaaacgaaacgaatgttctattatatgtatacgaatttagaagaatggttcatttgatgaaaaatatgtaaaaattcttagattcatactagtattggtacaagtttcacttttctatgagtacatcttagtgtagacttatacttggcggtaaactttacactggaaatagaattatttcaagataagcagttattcatagtttactgcgatattcttaattgaatgctaaataaaaataagaaaaatatagggttaaaaaagggaaacgtataaagacgttgaatatttttcttataaatagtaaagttgcgattgttgttccatatattgagttgtatggtataaataaagaaggaggtgccaaagaatgaacagcaatgaaatatatgttagtcttgacatcggtacatccaatgttaaagtcatcattggtgaaatggttaatgacagcttaaacattattggtgttggaaatgtaaaatcaaatggtttaaagaagggatcgatagttgatatagacgagactgttcgatcaattaaaaaagcaattgaacaagctgagcgcatggtgggaatccacattgagcaagttgtagtaggtgtcaatgcaaaccaggtacagctacttccttgtcacggagtagtcgctgtttcaaatgaagatcgtgaaatcgggaatgaagatgtcttacgcgttctagatgcagcacaagttgtgtcaattgctccagagcgtgagtttattgatgtggtacctcgacagttcatcgtagacggtcttgacgagattaacgatccacgcgggatgatcggtgtaagattagaaatggaaggtacacttattacaggctcgagaactttactacataacctacttcgttgtgtagaaaaagcaggtcttgaaattgttgatatttgtcttcaacctttagcggctgcaacagttgctatatcttcagatgaaaaaaatagaggagtagcccttgttgatatggggggaggatctacaactttatctatttttaaagatggagagttacaagcgacgagcgtattaccattaggtggagaccatataacgaaagatattgcgattgggttgaaaacttcaacagaaaatgcagatcaaattaagttgaaatatggacatgctttttatgatacagcatctgaagaagagatgtttacggttcctattatgggaagtgatcaaacagaacaatattctcagttggaattatcggatataatagaggctcgtgtagaggaaattttaatgtttgttcaagatgaagtgcgtaagttaggagtaaagcaagtggcttctggttatgtactaactggcggaattgcttctatgccaggtgttcttgatcttgcatatgatattttacatgaaaatgttcgtgtagcaactcctgattatattggtgtgcgtgagccccaatatacaagtggagttggattaattaaacattcttatcaaaaagctaaattacgtgggaaaaatgtgcaggaaaagcaagagcattttgaaccagtaccagcaccagcaccaacgccggtacaacagcaacccgcgaaacaaaaaactcgtaatcaaaacaataataatcaaaatgatgaccgcatgatgtcaaaagtaaaacgtgtattccgttatttatgggattaaaattggacacgaaaaatgaggttctagggggatttcgacatgttagagtttgatactactcaagatcaattagcgaatataaaagttatcggtgtcggcggtggcggaaacaatgctgtaaaccgtatgattgaacacggtgtacaaggtgtagactttatcgctgtgaacactgatgcacaagcattaaatctatcaaaagctgaaacaaaaatgcaaattggtggaaaattaacgcgtggacttggtgcaggcgcaaaccctgaagtagggaaaaaagctgcagaagaaagtaaagaacagatccaagaagcacttcgtggtgcggatatggtcttcgtaactgccggtatgggcggtggaactggaactggtgcagctccagttgttgctcaagttgcaaaagaattaggtgctttaacagttggtgttgtaacacgtccatttacttttgaaggacgtaagcgtgcgacgcaagcagcatctggtattgcagcatttaaagaaaatgtagatactcttattgtaattccaaacgatcgcttattagagattgttgataaaaatacgccaatgttagaagcattccgtgaagctgataacgtattacgtcaaggtgttcaaggtatttcggatttaattgcaacgccaggtttaattaacttagactttgcagacgtaaagacaattatgtctaatagaggttctgctttaatgggtattggttctggtaacggggaaaatcgtgctgcagaagctgcgaaaaaagcgatttctagtccattactagaaacatctattgatggagctcaaggtgttatcatgaacattacgggtggcgctaacttaagcttatatgaagtacaagaagcggcagatatcgtagcttcagcttcagatccagaagtaaatatgatcttcggttctgttattaacgaaggattaaaagatgatatcgttgtaactgtaattgcaactggttttgatgatagcattgcaactcaaccaccaaaaccaattattcgcccgaatgcgaaccacacgcaacaacagcaacaaccagtagctcaaccttcaaaacaacgtgaagtaaaacgtgaaatgaagcgtgaagagccagttgtacatgagcgtcattcagattcagatgatatcgatattccagcatttttacgtaaccgtcgtagacgataaaaaaaggagctttcatgctccttttttgttttttaaatggaaaagacctgctaagcaggtcttttttttatttggtatattttgttggtgaaaataagagtatatcattctatgaatttgtacttttattttttaccgacagattatgtctagaaatcacaaaataacaaaaaaacacctccgcaaattgacacactttcctattggatatgcattatactagtctcaacttgaaaaaagaggtgaattgtttggttgtttacgccgacgttgtttggttgttaaacgcctgcattgattttcttttgcttttattaacagctaccgtgttaaaaaagaaaatcaaaaaatggaggcttgtgttaggggcatttataggttcaactattgttatttttgcctttactccttttgcttctatgatgacacatccaattatgaaactactgtactcgttacttattgtgtatacagcatttgggtttacaacatttagaaattatgcacaaactgtttttactttttactttgtaacctttatggttggcggaggattaattggaactcatttctttttgcaaacgaatgaaatggtaaatggattggttcaatctcagtcaatttcttacggtgatccaattagttggttatttgttatttttggttttccagtaatttattatttttctaaaaagcgtattgaaagcgtagaggtcacgaaaatacactatgatcaaattgtgaaagtaaaaattcaattagcagaagaagaactagaactggcaggtcttattgacagtgggaaccaactttatgacccattaacaaaaacacccgttatgattatgcatgtttcatcattagaacattgcttaccatcttggttaacagaacaaatttattccaaaacagaaattcctcaaataccagaaaatgattctggttgggcgacaaaattacgcttaattcctttccgtgcagtaggggtagagagtcaatttttgtgggcaattaagcctgacagtgtgcaagttgaccatgaaggtagttctattgttgtaaacaaagtattaattggattaaatacacaacagctttctactaatggggagtatcaatgtattgtgcatccaaaaatgttgatttcacaaaaaatggtaattgcttaataatgagaggcgggataatatgatgaaattaaaattttatttagtatacctttggtataaagtattgctgaaattaggaattaagaccgatgaaatttattatattggtggaagtgaagcgttgccaccaccgttaacaaaagaagaagaggaagttcttttgaataaattgccaaaaggagatcaggcagcaaggtcattacttattgaacgtaacttaaggctcgttgtatatatagcaagaaagtttgaaaatacagggataaatattgaagatttgattagtataggaacaatcggccttattaaagcggtaaatacatttaatccagaaaagaaaataaaattagcaacatatgcatcgcgttgtatagaaaatgaaattttaatgcatttacgtcgaaataacaaaaatcgttcggaagtttcttttgatgaaccactaaacattgattgggatgggaatgaactgttattgtctgacgtgttaggtacagatgatgatattattacaaaagatttagaagctactgtagatcgtcaccttttaatgaaagcattacaccaattaaatgatcgtgaaaaacaaattatggaacttcggtttgggcttgctggaggagaggaaaagacgcaaaaagatgtggctgatatgcttgggatttcacagtcatacatttcgcgtttagaaaaaagaattataaaaagattacgaaaagaatttaataaaatggtgtaaagaataagaccagccgttatgtaggctggtcttattctatttagttgtattaggaaagataatttaaataacaaatcgtgaaaaaaccacatgcataaaatccccttcaaaggaaatactttacactgtacagcaactcccgataggagggaacactttgacgagaaacaaagtagaaatttgcggtgttgatacagctaaacttccagtattaaaaaatgaagagatgcgtaaattatttcgtgaaatgcaaagtggagagataagcgcaagagaaaaattagtgaatggaaacttacgtcttgtactgagcgtcatccaaagatttaataacagaggagaatatgttgacgatttatttcaagttggttgcatcggacttatgaaatcaattgataattttgatttaggccaaaatgtaaaattttcaacgtatgctgtgccgatgattattggggaaatacgcagatatttgcgtgataataatccgattcgcgtatcgcgctcattgcgagatattgcgtataaagctttgcaagtaagagaaaagttgattgcagaaaattcaaaagaaccaacagcaatggatattgcaaaagtgctagaagtaactcatgaagagatagtatttgctttagatgcaattcaagatccagtttcattatttgaaccgatttataatgatgggggagatcctatctttgttatggatcagttaagtgatgaaaaacaaaaggacgagcagtgggttgaagaattagcattgaaagaaggaatgaagcgtttaaatgatagagagaaaatgattattagaaaacgtttcttccaaggaaagacacagatggaagttgcagaagaaattgggatttcccaagcgcaagtatcacgtttagagaagtcagccattaaacaaatgaataaaacgattcaaggataaggtctcaccaattatggtgagacctttttatatgtaatatggtttgtgctcatagtaggggatttgtgttcatataatgaaactagcatggtgtttcgtgtaggtggcttcctgtaaatatgagaaacagtttccaatttgtcatataagggagaggataaaaatggtgatacgaatttcagagttacagatgaaggatgttataaatatttcagatggaaaaaggattgggaatattggagatattgaaattgatatgaacacagggaaaatttgttctgttattatttcaaaacagacacgtatgctaggtatttttggaaaagatgttgagattgtaattccttggaaggaaattgtgaaaattggggaagatgtcatacttgtaagagtaaatcctgttaattctgtaacagaatcaatacaaacaccgacaatttcataaagaatattacaaattcctcttttttttctgttaggattatgaaaaaataaaagtatggtaaaatagacaggaagtaccatgcttttttctgttattttaattaaaaggagccgctttattatgagagaaccatttaaatatgtggacggtatactgtatttacaagcgtggaaagaacttggaaacattactgctggatttacgacaaaagatggtgggataagtacgggctcctttcatgcgatgaatttaggattacatgtgaatgatatcgtggagaacgttcatgaaaacagacgcattttagcaaataagttacaaaaaccattagaaaattggatttgctctgaacaagttcatgctcatcatgttgaaaaagtagggcaacaggaaaagggaagtggtgtctattcatatgaggacggcatttcaaaaacagatggcatttatacgagtaatgaagatgttctgttaacgtcttgttacgcggattgtgttccgctctatttttatgcaccatcacatggtatgataggacttgcgcatgctggatggaaaggcactgtacaagagattgcaaaggaaatgattcaaaagtggaatgcagaaggtatttcaagtgatgaaattcatgttgcaattgggccgtcgatcggatcttgttgttatgttgtggatgatcgtgtattaacagcagcacaggaagtagttaggggtgctgttcctcatcaaaaaatttctgacgggcagtacgcaattaatttaaaagaaattaatcgtatattatgtgtacaagcaggcataaaagaagagcatattgtaatgtcatctctttgtacaagctgtgaagagcaactatttttctctcatcgtcgtgatcaaggtaagacaggaagaatgttgagtttcataggttttaaggaggaagaaagcaagtgacagtacaagaaaatttagaaattgtaaacgaagctattaaagaatcttgcgctcgagctggacgttcgttgcaagatattaaacttgttgcagttacaaaaactgtagggattgaaaaaacaaatgaagtaattgaagctggagttatcgatttaggtgaaaatagaaatgaaggtttcttacagaaatacgagcatttcggttcaaaagttaattggcactttattggctcattacaaacgagaaaagtaaaagaaatcattaatgaaattgattatttacattcgttagatcgtctttcactggcgaaagaaattcagaaacgtgctgataagaaagtgaaatgctttattcaagtgaaaacctcatctgaagaatcgaagcaaggattggcaatagaagaggttgtttcttttattcaaagtttgcaagaattcgataaaattgaagtggttggactaatgacgatggctccatttacagaagaagaggaagaaatcagacgctgttttaaggaattacgtatgctgcaaacagaggtgcaggagctagagttattacatgcgccatgtaaagaattatcaatgggaatgtccaacgattacaagattgcaattgaagaaggggctacatatattcgtttgggaacgattttagtaggaaaagcgtaaaaggaaggagaatcttattatgagttggtcaaaagtaaaatacttcttttttgatacaccggaagaaaaagaagcagctcaatatggttatgaaaaggagcaaacagacatgaaaaagcagcaagatccaccagaacaacaagacgttacgtttccgaaagcgcaaccgaagcaaaatgttgtgagtattgaaacagcaaaacaatcttcaaaagttgttttattagaaccacgcacatattcggaagcacaagggattgcggaccacttaaaaggtagacgagctgttgtaattaatttgcagagaatgtctactgatcaagcggtacgtatcgttgactttttaagtggtactgtatacgctataggcggggacattcaaaaaatagggccgaaaacatttatgtgtacacctgaaaatgtagatattgttggtgcgatttcagagttattcggtgaagaagaagaaacaaatataaagaggtggtaatacgccatgacaacagtttttatagtgttaagttatgctatcgagatttactcgtgggcacttattatttacattctcctatcatggtttcctggtgcaaaggaatcatcttttggagagttcctggcacgtatttgtgaaccgtatttagaaccattccgccgctttattccgccgcttggaatgattgatatttctccaatcgttgcaatctttgcgttgaaacttgctaaaactggtttgttcagtttattaagctatttcttatagtaagaaggtaaatacatgagcatctacgaacattttaggcctgatgaggaggtctttgtggataaagtgctagagtggaagcgagcggcggagtaccatcaagtgaagttaacggattttcttgatcctaggcaacaacaaattgtttctatggtaataggacaaggtgatgttgctgtgcaatttggtggtgcaacgcctaatgcagagcgtaaaagagcacttatttatccagactatctagaattaaatgaagaagaatttcaagtagaagtattagaaattgactatccttccaagttttatacgctagaacataggcaaatattaggtacatttatgtctcttggtttaacaagagaaaaatgtggtgatattttgctgcaagaaaatcgtgcccaaattgtagttgcgaaagaaattgtatcgtatattgagatgaacttacaatcaatagggaaagtaaaagtctctttagcgtcagtgcaaggagaacaaattctacagatacatgaaacgtggggagagaaatctggaacggtttcttcacttcgtttagatgttatgttagctgaaatgttacatttatctagacagaaagtacaacctttcataaaaaatggtttagtaaaagtcaattggaaaacagtggagcaaacttcttatgaatgttatccaggagatgttttttctgttagaggatatggccgaagtaaattattttctgtagaaggtagaacaaaacgcgacaaatggagaattttgtatggtatactaaaatgattggttttttagaaggaaatcctcctattttgtcgaagaaaagatataattgaaagaggaaatttagataactacttggaggtggcgttgtgccgttaacaccattagatattcataacaaagaatttggtcgcggattccgtggctatgatgaagatcaagtaaatgagtttcttgatcaaattatcaaagattatgaattggtcattcgtgagaaaaaagctttagaagaaaaagttgcgcagttagaagggaagttagatcatttctctaatattgaagatacgttaaacaaatctatcgttgttgcacaagaagcagcggaagaagtaaaacgtaatgcgcaaaaagaagcgaaattaattgtgcgtgaagctgaaaagaatgctgatcgtattattaacgaagcattagtaaaatcaagaaaagttgcttttgatattgaagagctaaagaaacaagcgaaagtattccgaactcgtttccgtatgttattagaaacacagcttgagatgttaaacaacgatgattgggataaactaattgaattagaagacgaagtagatgaactgttgaaaaaagaagaaacagtgtaagcttgacgtttttctcattattacatataattttaaacaacatatttattaagaaaaacgaagatagggataagtaccttttcaaaccttatatagcgaactgaggatggtgtaagctcaggataaggagatagtgggaatatcaccctggagttccgcgctgaacaaatagagtaagcgtaggcgtgtattcgcgttaagaatataaagaggattctatacatatgtatagaatctactagggtggtaccgcgggagactttctcgtcccttttggggatgagaaggtctcttttttattccgttttttaagtatttcttttatacatgtaaggaggaattgagcatggagtacaaaaatacattactgatgccaaaaacagagttcccaatgcgtgggaatttaccaaaacgtgagcctgcaatgcaagaaaaatgggctgaaatgaatatttacgaaaaagtacaagaacatacaaaaggtcgtcctttatttgtattgcatgatggacctccatatgcgaatggtgacattcatatgggacatgcattaaataaagtattaaaagactttattgttcgttataaatcaatgactggttttagtgcgccatatgttccgggatgggatacgcacggtttaccaattgaacaagctttaacaaataaaggtgtaaaacgtaaagaaatgacagttgctgagttccgtaagttatgtgcagagtatgcatatgaacaagtagaacgtcaacgtgagcaatttaagcgtctaggtgtacgtgcagattgggataatccatatattactttagagccagcttatgaagcacaacaaattaaagtgtttggtgacatggcgaaaaaaggttatatctataaaggtcaaaaaccagtttactggtctccaacgagtgaatctgctttagcagaagctgaaattgaatatcaagataaaaaatcagcatctatttacgtagcattccctgtaaaagatggaaagaacgtattagaaggtgatgaaaagtacatcatttggacaacaacaccttggacattacctgcaaacttaggtatttctgttcatccagagcttgaatatagcattgtaaaagtaaatgatgagaaatatatcattgcttctgagctgtttgagacagttgcaaaaacgttagagtgggaaaatgctgaagttgtgaaaacagtaaaaggtagcgaacttgagtatacagttgcaaaacatccattctacgatcgtgattcattagttatgctaggagatcacgtaacaacagatgcaggtacaggttgtgttcatacagcaccaggacacggggaagatgacttcgttgttggtaaaaagtatggattagaagtactttgcccagtcgatgataaaggtgtattaacaaatgaggcacctggatttgaaggcttattctatgataaagctaacaaaccaattacagaaaaattagaagaagtaggcgcgttactgaaactaacattcattacacattcatacccacatgattggagaacgaaaaaaccaattattttccgtgcgacagcacagtggtttgcatctattgaagcattccgtaaagaattaatagaagctgtagcagaaacaaaatgggtaccagcatggggagaaactcgtcttcataatatggttcgtgaccgtggtgactggtgtatttctcgtcagcgtgcatggggtgtgccaattccggtattctatgctgagaatggtgatccaattattacggatgaaacaattaaccatgtagcagatttattccgtgaacacggttctaacgtatggttcgagcgtgaagcgaaagatctattaccagaaggatttacacatccaggtagtccaaatggtgaattccgtaaagaaacagacatcatggatgtatggttcgattcaggttcttctcaccaagcggtattagaagagcgcgaagatttacagcgtccagctgatttatatttagaaggatctgaccagtatcgtggttggtttaactcttcattatcaacagcagttgctgtaacaggtaaagctccatataaaggcgtactaagccacggtttcgtactagatggtgaaggacgtaaaatgagtaagtcgattggaaacatcgtcgtaccgaagaaaatcatggatcaattaggcggagacattttacgcttatgggtatcttctgttgactatcaatctgacgtacgtatttcagatgatattttaaaacaagtagcagaagtgtatcgtaaaatccgtaacacattccgtttcttattaggaaacttagacgactttaagccaagtgaaaatgcagtagctgtagctgaacttcgtgaagtagatcgttacatgttagtaaaattaaatgacttaattacaaaagttaaagaagcatatgagacatacgatttcgctgctgtgtatcatgcaattcataacttctgtacaattgatttaagttcattctacttagactttgcaaaagacatcttatacattgaaggtgcaaaccacgaagatcgtcgtgcaattcaaactgtattatatgatgttcttgttgcgttaacgaaacttgtaacaccaatcttaccgcacacagctgatgaagtatggccatatattccaggcgtaacagaagaaagtgtacaattaactgatatgccagaagctgtacaattagatgacgcggaagcgttaaaaacaaaatgggatgcatttatgacattacgtgatgacgtgttaaaagcactagaagtagctcgtaatgaaaaagtaatcggtaagtcattaaatgcaagcattacgctatatccaactgcagaaatgaaagctatgttagagtctattagcgaagacttaaagcaattattcatcgtttctgagtataaacttggtggtatgatggatgaagcgccagcagatgcaccgaagtatgaacatacagcggttgttgttgttcaagcaactggtgaaacatgtgaacgttgttgggtagtttcagaaacaattggtaaagatgctgaacatgaaacattatgtgagcgttgtgcaacagttgttaaagaaaactatgtaaaataataaaaaactgactgctattgatgcggtcagtttttttgttgatggtatatcaagatcactttcagactctttcctgtgaaggaaaaatgtgtgtgaggtaagcaaataaatttcggacacactaactgtacattacagctaggaggaatgtacacgtgaatgaaatttacatggaaataaaagaagaattgcaattgatgagaaaagagttgcaagagagactagctaaagaagtaatgcacaaatatgatgtcgagttcagccaagagcttggatatgaaattaaggaagagataaagaaaaaattgctattacatgatataaaagaggatttaaaggatgtagaacgcgcattatttaaaatggaaatagacatgtatggtatttgtgaagagacggggagattaatttccacaaagcaaatgaagacaatgccgactgcccgtacgattcatgaattcttctacgaaaaggtaaatgtatgaatacgcacaacgatattatattacctttttttaatttattttattcttctataaaggttcattgtgaaaaggtagcagctatgctaaaattttgaggtacactgtctttgtgggggaaatgaaaatgatatattatgtaatagcgttattcgtcattgctatcgatcaaatatcgaagtggttaattgtaaagaacatggaattgggtacgagtattccgattatcgacaatgtattatacataacatcacatcgaaatagaggcgctgcttggggtattttagaaaataaaatgtggttcttctacattattacagttgtttttgtagtgtttattgtattttatatgaaaaagtatgcgaaaacagacaagcttctaggtatttcgttaagcctaattttgggcggggcaattggtaactttattgatcgtgtatttagacaagaagtagtggatttcattcacgtgtatattttctcgtacaactatccagtattcaatatagctgattcagcattatgtattggtgttgtattaattattattcaaacattattagaaggcaagaaagcgaaggagtaattgaatgagtgaagtagtacaagtaacagttgcagcagagcaaaaaaacgagcgaattgataaattcgttgcagggataaataacgaatggtcacgtacgcaagtgcagcaatggattaaagatgacgttgtgacagtaaacggaaaagcggtaaaagggaattataaagtaaaagaagaagatgaaattacagtaacaattcctgaaccagaagagttagatattcaaccagaggatttaaatttagaaatttattatgaagatgcagatgtgcttgttgtaaataagccacgtggtatggttgtacatccagcaccagggcatacaagtggtacacttgtaaacggccttatgcaccattgtacagacttatcaggcattaacggtgtaatgcgtccaggtatcgtgcatcgtattgataaagatacatctggactattaatggttgctaaaaatgatatggcacatgaatcgcttgtaaatcagcttgtagcaaaaacagtaacgagacgttacaaagcgattgtacacggtgtgattccgcatgataagggaacgattgatgctccgattgctcgtgataagaaagagcgtcaaagtatgacagttgatgaaaatggtaagaacgctgttacgcacttccaagtgttagaacgctttaaagactttacgcttgtagaatgtcgcttagaaacgggacgtacgcaccaaattcgtgttcatatgaaatatattggctatccacttgcaggagatccgaagtatggtccgaagaaaacgttagatatgaatggacaagcacttcatgcgggtattttaggctttgatcatcctcgtactggtgaatatattcagtttgaggcaccgattccagaagtgtttgaagacgtattaaatattttacgaaaatagtattgacaaatcataagaaaactgagatactgacaacagttaaataatgatcctttaacacagccccgtgaggttgagaaggtaacggtttgaaatacttagggtatgttgtacccttttttcaaaagtcctctcgcacacgctgagaggactttttttataccattactctcacgcaagaaaaaagcttggaggtgtagagcatgcaagagaaagctgtcgttttagatgaccaaatgattcgccgcgctttaacacgaattagtcatgaaatcgtggaacgaaataaaggtgtcgataattgtgttcttgtcggaattaaaactcgtggaatttttattgcacaacgtttggcagaacgaattggtcaaattgaaggaaaagaaatggaagttggagagttagacattacgttatatcgtgatgatttaacactacaatcgaaaaataaagaaccacttgtaaaaggttctgatatccctgtagatattacgaagaagaaagttatccttgtggatgacgtattatatacaggaagaacagttcgagcagcaatggatgctcttatggatttaggtagaccatctcaaatccaattggcggttcttgttgatagaggtcatcgcgaattaccaattcgcgctgattatgtagggaagaacattccaacatcaagtgaagagcgtatcgaagttgatttgcaagagacagatcaacaagatcgagtaagcatatacgataagtaaagcccttttaaatgtagtcctgtgaggctgccaaagggtcttggctttcatatgtcaaatttggcatacgaaagtgtaggactctttgtgcacaggcacaaagagtttttttattgcaaagatttaaactgaaggaggatgtaacaatggaacaaaagccagtgttagacgttaatgaagtaccgaaaccgggaaaatggttatttttaagtatacaacatttgttcgcgatgtttggatcaacagtgcttgttccgtttttaacaggattgaatccatcagtagcattaatatcaagtggattaggaacgttagcgttccttcttataacgaaaggtcaagtacctgcctatctaggatcatcattcgcctttatcgcaccgattataacagcgaaaacggcaggtggaccgggagcagcaatgcttggtggtttgctagcaggacttgtgtacatcttaatctcactcggaattaagaaatcaggatcagagtggattatgaaattactaccaccaatcgtagttggtccagtagtaatggtaatcggtctagctttagcacatacagcagttaacatggcgatgaacggtgcggatggcaaatatagctttacacacttttcagtagcattagtaacattagcaattacaattatatgctcgatatttggaaaaggatttttcagtataataccagtgttacttggcattatcggcggatatatcttcgcttacttccaagggctagtagacttaaagccggtagctgaggcaaaatggtttgttgtaccagatttcacagtaccatttgtaacatatacaccagagttttcatggaagattgtactcttgatggtaccagttgcactagtaacaatatcagaacatatcggacatcaaattgttcttggaaatgttattaaaagagatttaattgaaaaaccaggtttacaccgttcaatcttcggtgacggagtagcaacattaattgcgtcactaatcggtgggccaccgaatacaacgtatggtgaaaacatcggtgtgctagcaattacgagagcatacagtgtatacttattcatcggttcagcagtattcgcaatcatgttcgggtttatcggtaagatttctgcactgattcattcgatcccaacaccagttatgggtggtgtatcaatcttactattcggtgtaatcgcatcaagcggattacgcatgatggtagatgataaaacagatttaagtgacaaacgaaacttaatgattgcatcagtaatattagtaatcggtattggtggagcggtacttcacgtaggagaatcattccaagtagaaggaatggcactagcagcaattgtaggtgtactgttaaatctactactaccggaaacgaaacaaataaaacaatctaagcagattgcttcataataataaccttttaattcagtcctgtgagaccggaaagggtggcttctttcttgcaccctagtctcacatgactagggtatttttatgcaaaggttgttataaaaattcaaaagtggtaacataaaaatcagaaagatgagggatgacgatgagccatttgttaacgatgagtgaattatcggaagtagaaatttcagaaatcctaaaagatgcagaagattttgcgaatggaaaagagagcaaaacgacagagcaaacttttgttgcgaacttgttctttgagaatagtacgagaacgagatttagctttgaagttgctgagaagagattaggacttgatgttttaaacttttcagctgatgcatctagcgtacaaaaaggagaaactttatacgatacgataagaacactagaatcaatcggaacaaaagcagtggtcatccgccacgagcaagatcgctacttcgatgaactaaaagatcaggtgaatattccaatcttaaacgctggagatggatgcggaaaccacccaacgcagtgcctactcgatcttcttacaattaaacaagagtttggaagatttgaaggtttgaagattgcaatagtaggagatgttcgtcatagccgagtagcacgttctaatgcagaagcattaacgaagcttggtgcaacaatttactttgcaagtccagaagagtggaaagatgaagacaacacatttggaacatacaaaccattagatgaacttgttccagaagttgatgtaatgatgttactccgtgtacaacatgagcgtcatgatcattatgaaacagacattatgaaagaatatcatgagaaacacggattaacagtagaaagagaaaagcgtatgaaagaaggaagcattattatgcatccagctcctgtaaaccgtgatgttgaaattgcaagtgaacttgttgagtgtgagcgttcacgcatatttaaacaaatggaaaatggagtttacgtaagaatggctgtactaaaacgcgccttaccaaatgtattaggaggaatgaaacatgaattatttgtttaaaaatggtcgttatatgaatgaagaaggaaaaatcgtagcaacggatcttctcgtacaagacggtaaaatcgctaaggtagcagaaaatattacggcagataatgctgaagtaatcgatgtgaacggaaagttaatcgcacctggattagtagatgtacacgtacatcttcgtgaaccaggtggtgaacataaagaaacaattgaaacaggtacactagcagcggcaaaaggtggattcactacaatttgcgcaatgccaaatacacgcccggtaccagaatgcagagaacatatggaagacttgcaaaaacgtattgaagaaaaagctcatgttaacgtactaccatacggagcaattacagtacgtcaagctggttctgaaatgacagatttcgaaacattaaaagaacttggagcatttgctttcacagatgacggcgtaggcgtacaagatgcgagcatgatgttagcggctatgaaacgtgcagcaaaattagatatggcagtagttgcgcactgtgaagagaatacgcttattaataaaggttgtgtacatgaagggaagttttctgagaaacacgcattaaacggtatcccatcagtatgtgaatctgtacatattgcaagggatatactgcttgctgaagcagcagattgccactatcacgtatgtcatgtaagtacgaaaggttcggtacgtgtaatccgtgatgcgaaacgcgctggaattaaagtaacagcagaagtaacaccgcatcacctagtgttatgtgaagatgatatcccatcagctgatcctaactttaaaatgaacccaccgcttcgtggaaaagaagaccatgcagcattaattgaaggtttattagatggaacgatcgatatgattgcaactgaccatgcaccgcatacagcggaagagaaagcacaaggaattgaaagagcaccgtttggaattactggttttgaaacagcattcccgcttctatacacaaaccttgtgaaaaagggagttattacgctagaacagttaattcaattcttaacagaaaagccagctgatacattcggcttagaagcaggtcgcctaaaagaaggtagagcagctgatattacaatcattgatttagaacaagaagaagagattgacccaacaacattcttatcaaaaggaaaaaatacaccattcgcaggttggaaatgccaaggatggccggtaatgacaatcgttggtggtaagatcgcatggcaaaaggagagtgcattagtatgaaaagacaacttatcttagaagatggaacagtattaattggaacaggtttcggaggcgaaatcgaaaagtcaggtgaggttgtatttacaacaggaatgactggatatcaagaaacattatctgatccatcatattgcggtcaaatcgtaacattcacgtacccattaatcggaaactacggcattaaccgtgacgattttgaatccattcacccatctgtaaatggtttaatcgtaaacgaaatttgtgatcatccatcaaacttccgtaatgaaatttcgttaaatgattacttgaaagaaagaaatatcccaggattagcagggattgatacgagaaaattaacgagaaaaattcgtcaatacggtacattacgcggacgcctttgtaatatggatgcagatgtagagtacattgtaagtcaattaaaagcgacagtatttacagatcatgtaaaacgcgtatcaacgaaagatccatacccaagcccaggtcgtggtcaccgagttgtactagtagacttcggtatgaaacatggtattttacgagaattaaataagcgtgactgtgatgtaattgtagttccttacaacacaacagcagaagaaattttacgccttagcccagatggaattatgttaagtaatggacctggagatccgaaagatgtatcagaagcaattgaaatgttaaaagacattatcggtaaagttcctttattcggaatttgcctaggacatcaattgttcgctctagcatcaggtgcaaatacaagtaagttgaaatttggtcaccgtggtttaaaccatccagtaaaaaatcttgcaactggaaaagtagcaattacatctcaaaatcacggatacgcagtagaagaagaatcagttgaaaatacagatcttgaaattacacatgttgctttaaacgatggaacggtagaaggtcttcgtcataagaagttcccagcatttacagtacaataccatccagaagcttcagcgggaccagaagatgcaaatgatttattcgaagatttcttaacaatgattgaaaacttcaagaaagaaggggaagagttatgccaaaacgcctagacattaacacaattttagtaatcggatcaggaccaattgtaattgggcaagcagcggagtttgactactctggtacacaagcttgtcaatctcttaaagaggaaggttacaaagtaatccttgttaactctaacccagcaacaattatgacggatactgcaacagcagataaagtatacatcgagccattaacattagaattcgtaagccgtattattcgtaaagaacgtcctgatgcaatcctaccaacattaggtggtcaaacaggtttaaacatggctgttgaacttgcaaaatcaggcgtacttgacgagtgcggagttgaaattttaggaacaaaattatcagcaatcgagcaagcggaagatcgtgatttattccgtacattaatgcaagatttaaatgaaccaacaccaccaagtgaaattattcataaccttgatgaagcatatggatttgtaaatgaaattggttatccagtaatcgttcgaccagcgttcacattaggaggaacgggcgggggaatttgccataacgaagaagagctaattgaaatcgtaacaagtggtttaaaacatagtccagtaacacaatgtttattagagaaaagtattgctggctgtaaggaaattgaatatgaagtaatgcgtgattcaaatgataacgcgattgtagtatgtaacatggaaaacatcgatccagttggtgttcacacaggtgattcgattgtagtagcaccgagccaaacgctaagcgaccgtgaatatcaaatgttacgtaacacttcattacgaattattcgtgcactaggaattgaaggtggatgtaacgttcagcttgcgcttgatccatatagcttccaatactatgtaatcgaagtaaatccacgtgtaagtcgttcatctgcactagcatctaaagcaactggatatccaattgcgaaattagcagcaaaaattgcagtcggcttaacgttagatgaaattgtaaacccagtaacacaaaaaacttacgcttgcttcgagccagcgttagactatgttgtttcaaaaattccacgttggccgtttgataagtttgaatcagcgaacagaacgcttggaacacaaatgaaagcaactggtgaagttatgtcaatcggacgtaacttagaagaatcattactaaaagcagttcgttctttagagcttggcatttatcacttagaattagaccacttaaaagaacttgataaagaaacgatgaaaaaacgtatcattaaagcggatgatgaacgactgtttattgtagcagaagcaattcgccaaggtgtaacgaaagaagaaatcaatgaatggtgtgaaatggacttcttcttcttacaaaaagttgaaaacatcgtaaatatggaatgtgaagtaaaagcgaatgtaggaaatatagaagtactacaaactgcaaaagaaatgggcttcagcgatcactacattgcagcagcttggaacaaaacggagcgtgaaatttacgatatgcgtaaagaaaataatatgatgccagtattcaaaatggtagatacttgtgcggcagagtttgaatctgcaacgccatattactacagcacatatgcggacgaaaatgaatcgattgtaacagatcgtaagagtgtagtagttctaggatctggtccgatccgaattggtcaaggtgttgagtttgattacgcaacagttcactcagtatgggcaattaaagaagctggatatgaagcaattatcattaacaacaacccagaaacagtttcaacagacttcagtatttctgacaaattatactttgaaccattaacgattgaagatgtaatgcacattatcgatttagaaaaaccagaaggtgttatcgttcagttcggtggacaaacggcaattaacttagcagcgaaactagaagaacacggtgtgaaaattttaggaacatcacttgaagacttagaccgtgcagaagatcgtgataaattcgaagctgctttaacaaaacttggcatcccgcaaccagttggtaaaacagcaacgactgtagaacaagcggtagcaatcgcagaagaaattggttacccagtattagtaagaccatcttacgtactaggtggacgtgcaatggaaatcgtatatcgtcaagaagaactgctgcactacatgaaaaatgcagttaaagttcatgcagatcacccagtattaatcgaccgttacatggttggtaaagaaattgaagtagatgcaatttcggatggtgagaatgtattcattccaggtattatggaacatattgaacgcgctggagttcactctggtgactcaattggagtatatccaccacaaagtttatctgaaaaactaaaagaacaaatcattgaacatacaattgcacttggaaaaggattaaacattgttggattactaaatatccagtttgtagtattcaaagatcaagtgtacgtaattgaagtaaatccacgtgcaagccgtacagtaccgttcttaagtaaaattacaggcgtaccgatggcgaatgttgcaacgaaagttattttagggcaagacctagtagagcaaggatacggaactggctatcacccagaagagaaagaagtatatgtaaaagctccggtattctcattcgcgaaactacgctcagttgatacaacattaggacctgaaatgaaatcaacaggggaagtaatgggtaaagacttaacgcttgaaaaagcattatataaaggattagttgcttctggaattaacatcccaacgcacggctcagtaatcattactgtagctgataaagataaagaagaagcgatggaaattgcaaaacgtttccacgaaatcggctataacttattagcaacagctggaacagcacaatcattagaagagcaaaatatcccagtacaagttgtaaacaaaattgattctgaagactacaacttactagatattatccgtcaaggaaaagcacagtttgtaattaacacattaacaaaaggtaaacaaccagcgcgtgatggtttccgcattcgccgtgaatcagtagaaaatggtgtggcttgcttaacatcacttgatacaacgagagcaatcttacgagtattagaatctatgacattctcagctcattcaatgaaagaaattacgcaaacaaagcgtcacgaggtggtacatgcatgatgcaaaagcaaaatatgatcgtcgttaatcaaaaagaaatcgcaaaaaatatttacgaattagtgcttcaaggaacgttagtacagcaaatgaacgaaccagggcagtttgtacacattaaggtagcagagggcattgcgccccttctgcgccgcccaattagtatttgtaatgtagatcaagagaagaacgaatttacaatgctatatcgtgccgaaggacaagggacaaaaacattagcaactagaaaacaaggtgaaatggtagatgtactaggaccattaggacacggttttcctgtagaagaagcagaagctggtcaaacagctttactagtaggcgggggaattggtgtaccaccactttatgaattatcacagcgcctcgttgcaaaaggtgtacgtgttattcacatcttaggctttcaaacgaaagatgtagttttctatgaagaaaaatttgcagaacttggtgatacgtacgttgcaacagtagacggtacacacggtacaaaaggatttgtcacagatgtaattgataattacggaattgactttgatattctttattcatgtggtccgttagcgatgcttcgtgcattagaaggacgttacaaagagaaaaaagcctatatttcattagaagaacgtatgggctgtggtattggagcttgtttcgcatgtgtatgccacttacaagaagatccaagtggacattcttacaagaaggtgtgtagcgacggaccagtatttccaatcggggaggttgtactatgaacagattgcaagttgaattaccaggattatcattaaaaaatccaattataccggcatctggatgctttgggtttggtcgtgaatatgcacagttttacgatttaagtgtactaggatcaatcatgattaaagcgacgacagaacaaccacgttatggaaatccgacgcctcgtgttgctgaaacaccaggcggcatgctaaatgcaatcggacttcaaaacccgggattagacaaagtaatgaattcggaattaccatggttagaacaatttgaccttccaattattgcgaacgttgcaggctcacaagctgaggattacgtagcggttgcgaaggaaatttctaaagcgcctaatgtccatgcactagaattaaatatttcttgtccgaacgtaaaaacaggtggtatcgcctttggtacaaatcctgaaattgctgctgatttaacgaagcgagtaaaagaggtttctgaagtacctgtatacgtgaagttgtcaccgaacgtggcaaacattgtggaaattgcaaaagcgattgaaaatgcaggtgcagatggtttaacgatgattaatacattgcttggtatgcgtctagatttaaaaacagctaaaccaattttagcaaactgtacaggtggattatcaggtcctgcgattaagccagtagcaattcgtatggtacatgaagtaagccaagcggtaaacattccgattatcggaatgggtggtattgagacagcggaagatgtaattgaattcttctatgctggcgcaagcgcagttgcagtaggtacagcgaactttattgatccgttcgtatgtccgacaattattgaagagttaccagcattactagatgaattaggatttgatcacatttcggaatgtcaaggaaggagctggaagcaaacatgtcacagtcgttaatcgttgcattagattttccagggaaacaagatgtagaacaattcttgcgccactttgaaggggaagagttatttgtcaaagttggtatggagttattttacaaagaaggccctgcgattattacgtacttaaaagaaaaagggcataagatctttctagatttaaaacttcatgatattccaaatacggtaaaaagcgctatgcgtagcctagctagtctagatgttgatatggtaaatgttcatgctgctgggggaagcagtatgatgaaagctgcgattgagggattagaggaaggtaagcaagaaggaaaagagagaccgatttgtattgcagttacacaactaacaagcacttcggaagctatgatgaaaaaagagatcggcattgagaaaacgttagaagaagcggttgctcattatgcaaaactaacgaaagaaagtggacttgatggcgttgtttgttcaacacttgaagttccaaaattacgtgaagtatgcggaaatgaatttgtaacggtaacaccggggattcgtcttgcaagcgatgatgtaaatgaccaagtgcgcgtagcgacaccgaaacgtgcgagggaacttggctcaagctacattgtagttggacgtagtattacaaaagcagaaaatccgcttgaagcgtataaaacagtaaaacaacagtgggaaggtgtaacagtatgaaaaaagaaatcgcatcgcatttattagaaattggagcagtatttttacaaccgaatgatccattcacttggtcttcaggtatgaaatcgccaatttattgtgataaccgtttaactttatcttatccaaaagtacgtcaagcgattgcagctggattagaagagttaattaaagagcacttcccaactgtagaaattattgcaggaactgcaactgctggtattgcgcacgctgcatgggtaagcgatcgtatggatttaccaatgtgctacgtacgtagtaaagcaaaaggtcacggtaaagggaaccaaatcgaaggaaaagctgaaaaaggtcaaaaagtcgtagtagtagaagacttaatttcaactggcggtagtgcaattacatgtgtagaagcacttcgcgaagctggatgtgaagtattagggatcgtatcaatcttcacatacgagcttgaagcaggaaaagaaaaactagaagcagctaacgtagcatcatattctttaagtgattacagtacattaactgaagttgcagcagaaaaaggtatgattggacaagctgaaacgaagaaattacaagagtggcgtaaaaatccagctaacgaagcttggatcacagcgtaacacgaaaaaagacgaccgcgggggaacgcggtcgttttttatatcattgttaaaacttcaagtaaagttccatcaatatcaaagaaaatcatattacaatctccttaactacttagcgctttctgcaagctcatatcctcttaaaaacaataaagtcatataagaaacaataaatgagaagatgctgtacatgccaacccaaaagaaaaattttggagtaaaggcgataacacctattattaaaaaactagcaaacgttacaatcggcattacgtaatacgttttcgtcttgcgcgttccaataacagaaacgataaagataagtaatggacaaattaataagacgaaaatcaattcattcataggtatgtccccttttctaattgcagtaatctgtttctcgtaaacgttttgaaataattactctcctaatataatttcgctaagtaataacgaatccctcttgaaaactgataattcatgatgaattttacaagcaaaaaacgtaagcaagagaacacttgcttacgttataggataaacatcgcaacgatcgtggtgacaattaaaccgataacaaccggtaaaaagtttcggcgtgcaagttcaaatggatcgactttacaaatcgcagcagcaggaataagtgcccaaggaattaacgtcccgcccccggtccatatagctgcaatttgcccgagtgctgttaatgtagctgttccatggccaagtgctgttccaaaaagattggcaatggaaccagcaagtgatatacctgaaaaacctgatccatctaagccggtaatgacaccaacgatggttaatgtccctgccgatacatattgatttaaaggaacagtttgagataaagcgatgcctaagtcgttaatgattccgtgtgaacctttcggtaaatagtccccgataatttttacaaatccactatctcctaaataaaagagtgcagcgataggaataactggtccgaaaattttaaagccaaattggagcccttctatgaaataatcggtcgttttattcagtccatttcctttgtaggcgatgagggaaatgatgataatcataataacagtcgttccgccgataagtgcagttgcgtcgcttccttgtaatttaaattgaatcatgcaaaggatatcaatgatatatatgatagggatacaaatagcgagccatttttttatgcgagaagataatgaagtgagcgttttagaagactcagttgatggaatagcttcttgtatagataagcctgtatgaaactcttttcgtaagaagaaaaaagcgacagaagttgtcacaatgcccataacgataacgagtggaacacttgcagatacgatgctggaaacagggagaccagccgcgtctgcagttaatttcggtgcaccttgaataacgaagtctccagataaggcgatgccgtgtccaaataagttcatagcaattgcaaccccaattggaggaaggccgacacgtacagcaaccggtaataaaatagctcccattaaggcgacagctggagaaggccaaaagaagaaagaaatggtcatcattaaaaggccgataatccagtaggcgagtgtaggtgtacgaatcatttttgtaaatggtgaaatcatcgtatcatttatgccagtatgaacgagtaaattgctcattgatacgataatggagatgattaatatagttggtaatagctcagtaatggcgtaaatgaaactttgaaaaattccgctaatggcaagagggatagaacttgttgcagttaatgctaataaaaagataaaaacgatacaaatgatagtcgtatcttttcggagaataaaaaaggtaataatagtgagtaaacaaataatgtagagagcgtgtaatagcgttaattcaactcccataacattcacatcctttaggcattcgtgtagtgtattgtatgaaagcagtgaaagtatgtgagtataggaaaaagaaaaaatgaaatttcatgtactgtaatggtaagaaagataaatggatgttacaatacaaataatcctaaaaatggaatttaaggagaacttatgcgcaaaaaaattgggttttggggatttaccatatcttgtagtctattaatcactttaaatttgtttacaaacaatgaatggatcagtatcatacctgttttcggctttgtttttatactgttatataactgggatgatatgaaacaatatagtaagaaaagtatcggaattatgataggtgtcattgttgtttgctcatttttcgtagggtttattttaatagaagggcagaaacaaatagagaaaacgtctatttttcaagaatggatgtcgtctgcaaaaggtctttatattgtaattatagctgttatttttctaagaattattataagcatagcaagttacgtattaaaggagaagtagaatgggggagtacgaatgagagagaaaataggatattatggtgtgctcgtttgtttactattatcagttatttcaggacaattccttaacagtgactgggtaccagctatattatgtataggagtattgatttttgcatctatgtatcgttggaatgaatggaaagcatatagccgaaaaaagaaatttgttttcagtatcgagtttgtcattattattagcacaattccgttttttctattgaaaggaaatgagataatagatggaattgtaatgtttcaagggtggttatttattgcgaaaatgctgtatttaatatgtatattaatgtcggtagtggtaatcgttaaaaaagtaaacgaaaagttattcgttaatgaataaaagaaaatgccaccttattcggtggcatttttttctatgatttcaacaaggaataacaattagttcccgatttgattttgtaataacttcatagccttcttttgtaatgacgatatcgtcttcaattctacaaccgccccagttcggtatgtaaatgcccggctcaactgtaacaaccataccttcttgtaaagttaccttactttcttgggataggcgaagcggttcatgtatttctaacccaagaccgtgcccagtagagtggccaaagtattgaccgtatccatgttctgtaatgtaatccctcgttatatcatcgatacttttcgcagtttctccaggcttaatcgcttcagtcccacgttttaacgcttctcgtacaacattgtatatttttttgaattcttccgatggttcccctattgctacagtacgtgttatatcggaacaatatccgtcgtaaagtgcaccgaagtctaatgtaacgatatcccctcgttcgattattttatttgatgcaactccatggggaagtgaagaacgaacgcctgaggctacaatgatttggaatgaagaagatgtagcccctttttttcgcatgaaaaattctaattcatctcgtacagcattttcacttattcctggttttagaaacgtaagaatgtggtgaaatgcttcgtccgcgatattagctgcaattttcattgtttctatttcaggcgtgtctttaatgatacgaatattttcgataatttcgcacacttgaatcatttccgcctgtacgtatttttgcaagtttttatattgttgcaatgtcatgttgttttcttcaattccaagtttttgaatgtttaatttcgatacttgatgtgcaatttctttttctaaatttcctttatgcataataatttcagcatcttttatttgtgatttcgcttgatctacatagcggaaatcagtgataaaaacagcttgatcggcagagattaagacgacgccagcactacctgtaaagcctgttgcatattggcggttttcttttttggtaataagtaacccgtcaatttcatagttttgtaattgattttggattttattaatttttaaagtcatgttaattcctcctattcacagtattgaataaagcaaatagcgtgccaaaatgtatatttgaagaaaggatagtagggacaacatatattttaggggagataaaaaaatagcccgtaatttgtgggaggcggtttgttcataaaatctagattgcttcaatgaatagcagggggatggggaaaaataatgattggagttacacttgtactttatttacatgctgtaaaaaattttatacaaatgtgaaatgatactgtcaatttttttgacaatattgaatgaatatagcaacgaaattgaaaacatataaaaaatgcgctgcatacaagcaacgcattttttatttacgcttttaatttcattacaatatcagcatctggtgttacatatacggtttgctgattgtcgtacgtaacaaaaccaagttttgcaccactcggttttttgacatggcgtattttggtgaaatcaacaggtacagagctagactctttcgctttgctgtaataggcagcaattttggcagcttctagtaaagtttcttcagcaggctctaaagaacgaatgacaacgtgagagccaggtatgtctttcgtatgtaaccaaatttcatcacggcgggcaaacttcgttgttaaataatcattttgtttattgtttttaccaacgaaaatctctgtgccatcacttgctacatatttatctaatactggtttagtaggctttttctttgcgtttttcgttttgcgattgcgcacataaccttcttcagctaattcctcacgaatttcttcaatatcttttgaagaagcagcttccatttgttgaagtaagctatcaaaataaagaatttcttcatttgttttttcgatttgttcttctacaacaacaactgaattttttgctttttgatacttttggaaatagcgttgtgcattttcagatggtgtttttaaaggatctaatgtaatttttacagttccaccattctcatcgtaataattaacgacctcaatatctttatcgcccttttttaaagcgtacatattggctgtaagtagctctccaaatagttgatatttatctgcttttccagcatcttgcagtgttttttcgagtttaatgagttttttctcgtttttatttttttcgttttgcataaagcgttctaaatcatgagcttgttgttttacacgatcacgttctgctttgccaaagaagaaacgatctaacaattcgctcactgatgagaatgttttttcttctccttgcaagtgtgtaagagggaaaagataaaagaattcttttccatttgcagtaatcattgtaggtgtatatgcatgagatagtaatggtgtttgtatagagaaaaatgcttctgataatgctttctcgtttgccataccggctttctttactacttcttttgcaaataatggggatattcccatgaaagcaccgacgagttgtttatccatatttccagatagaaagtctagcggtctaataaaatcatctgcggtttcaatttgcagaggattgattttatgttgggctggtggcgcgacgtactcagcaccagcatatacagttcggtgacggtttacggctaatgaaacgtgttttaagctatctaaaatcacgtttgttttcgtatctaataagataatgttactatgtcgtcccattatttcaattactaatgtttttaatgattcgtctccgatttcattacgactgcgaactgtaatttgaataatgcgttctaagtcgatttgttcaattttttcaataaatccaccttctaaatgtttgcgaagaagcatacagaacatcggcggtattgctggcgaatcgtagttttgattcgttaagtgcatacgcgcatatgtaggatgagatgaaagaattagtttttggttctttccattcgctcgaatatgtaataaaatctcgtattttgaaggttgatatattttggaaattcttcctgtgtaaagagaattttcaatttcatgtgtaatcgctcttgtaaataatccatcgaatgccataaatgaacactcctttctaactaaatgttaattatagcatttttttggacgaggctgaataagctttcaatagagtatgtctggaatcaggaggtcgatagcaggatgaactggtatggaatgcgagcacatgaagtggaagaaagaacgaatacgaatgtaaaggttggacttacagagaaagaagcagaagggcgagtaaagaaatttggtactaatgaattagaagaagcaaaaaggccttctgcactaatggtatttttagcacagtttaaagatttcatggtactcgttttgtttggagcaacaattgtttctgcgtttttaggtgaatacattgattctattgctattgttgccattgttattatcaatggtattctcggcttttttcaagaaagaaaagctgaaaaatcattggaagctttaaaggaactagccgctccacaagttactgtaatgcggaatggaaagtgggtaaaagcaccatctaaagcacttgttttaggagatattattaagttttccagtggtgatcgtattggggctgatgtgcgtcttgttgaggcatcaagtttatatattgaagagtctgctttgacaggggagtccgtacctgtacaaaagaaggtagaagcattgcaagggcaagatgttgcaattggggatcaaaaaaatatggcttttatggggacaatgattacgcgaggatctggtacaggagttgttgtagcaactggtatgaatacagcgatggggcaaattgcaaatatgttgcaaaatgcagagcaaatggaaacgccactgcaaagaaggttagaacagctcggaaaaatattaattattgtagctcttattttgacagcgctcgttgtattggctggtgtgtatcaagggaatgaagtatatcatatgtttttagctggcgtatcgctagctgttgcggctattccagaaggattgccagcaattgttacagtagctttatcacttggtgtacagcgtatgataaaaaagagagcaattgtaaggaagttaccggccgtagaaacgttaggctgcgcttctgttatatgctctgataaaacgggaacaatgacgcaaaacaaaatgatggtaacacatatgtggtcaggcggagaattgtggaaagtgacagggcaaggatatgaacctaatggctcttttatgaaaggtgaaaaagaagtgaatccagctaagacaaaatcactttatcagctacttacatttggttcactatgtaacaatgcaaatattattcaaaagaaaaaggcgtacgtattagatggagatccgacagagggagcgcttgtagctgcagcaatgaaagctgggataacacgtgaggcattaaaagggaaatttaaaattattcgtgaattcccctttgattcaactcgaaaaatgatgagtgttattgtacgagatcgagaggggaaaaagtttattgttacgaaaggagcaccggatgttcttttgcaactgagtcaaacaatcttatggggggataagcagcagccgttaagtgagctatatagaaaagaagtacaggcggctattcatagcttaggtagtcaagcgcttcgaacaattgcagttgcgtttaaacctttaaaagtcacggattctattgaacatgaaagagacgttgaaaaagattttatgttggttggaatacaaggtatgattgacccgccaaggccagaagtggcgcaggcggtaaaagagtgtaaagaagctggtattcgaacagtaatgattacaggtgatcataaagtgacagcaatggcgattgctgaacaattaggagttttaccaccagatggacgcgttgttgaaggagtagaactcgcgaatatggatgtggaggaattagaaaatgttgtagaagatacgtatgtattcgctcgtgtatcacctgagcataaattgaaaattgttaaggcactgcaaaatcaaggacatatagtagcgatgacaggtgatggagtgaacgatgctccagcgataaaaacagcggatattgggatagcgatgggaattacagggacagatgttgcgaaagaagcctcttcacttgttttactagacgataattttgctacaattaaatcagcaattaaagaaggaagaaatatatatgagaacatacgtaagttcattcgctacttattggcgtcaaatgttggagaaattttagttatgttatttgcgatgttacttgcattaccactgccgatggttcctattcaaattttatgggtgaacttagttactgatggtttaccagcgatggcattaggtttggataaggctgaaggagatgtgatgaagagaacaccgcgtcacccgaaagaaggggtattcgctagagggcttgcgtggaaaataataagtcgagggtttttaattggagcagtgacgttagtggcgtttattattgcgtataaccaacatccaaatgaactgaaatatgcacaaactgtagcgttcgcgacgttggtacttgctcagcttattcatgtatttgattgtcgtagtgagcattctgtctttcaccgtaatccatttgggaacgtgtatttagtaggggcggttattatttcgttactactcatgctagtggttatatattatccaccgttacaaccaatctttagcacaatgccgatacaagcaagagattggttattaattggaggtttgtcatcaattccgactttcttactagtaggttctttattaacagggaaaaaggctaagaagaaaaagccgatattatataagaagggattaaacttgaaatagtcaatgttatgaaaatgtgatataatttacagaaggtagtagagccttgtctctattacctttttcattgagttattttatggcttggatgtgataaaaatgatttctagtatgacagggtttggaagatcgaaagtagaaagtgatacttttcaaattacagtagaaatgaaatcggtgaaccaccgttttttagagatgagtattcgacttcctaagcaaatgatggtatttgaggacaaaattcgtaaaataattgcacagcaagttcgacgtggacgcattgaagtgtctattagtatagcgggtgaaggacttgttgaaagaaaattaagtgtgaattggtcacttcttgagcagtaccaatcgatgatggaagatataaaagggaaatttcaattacaagattctattacacttcagcaattaatggcaatgccagaagtaacagcaattgaagaaatagaaaatgtaaatgagcattttgagaacagtttatatgaggctgttcgtcaagctgctcatatgttgaaaacgatgagagatggcgaaggagaacgattacataaagatatagcgtatcgtttacaagagattagcaattgtgtaaatgcaattattccacatgcaccaattgttacacaaaaatatcgtgaacgattagaaaatcgcttaaaagaattacataatcaagatctagatgaacaaagattgctaacagaagtcgcaatctttgcagagcgttgtgatattcatgaagagttagttcgtttgcaaagtcatttagagcaatttcgtgaaacattgcagattgaagagcctgttggaaggaaaatggatttcatcgtgcaagagatgcatagagaaattaatacgattggttctaaggcaaatgacttaacaatttcaaaatatgttgtagaaatgaaaaataaccttgaaaaaattcgtgaacaagtacaaaatattgagtagctttcaaaaaatatataaagttatacgtggtggagaaatcggatagacttactaggaggcgcaaactatggccatgcggtttttaaatattggatacggaaatattgtatctgctcatcgaattattgctattgtaagtccggagtcagctcctattaaacgaacagtacaggaagcacgcgaacataatgctttgcttgatgctacgtatgggagaaaaacaagggcggttattgttatggatgatgggcatgttgtattaagtccaattcaaccagagacgattgcacatcgtttgaataataaagaagatttaagtgaggaagggtaggttttacatatttatgagaagtagaagaggattgctcatcgttctttcagggccttctggggttggaaaagggacggttcgtaaagagctgtttagccatgaggatacacgttttcagtactctatttcagtaacgacacgtaagccgcgtgaaggtgaagtagatggtgtggattatttctttaaagaaagagaagaattcgaggaaatgattcgtaatgaaaaattacttgagtgggctgagttcgtaggtaattattacggaacaccgattgactatgttgaaaaaacattacaagaaggaaaagatgtattcttagaaattgaagtgcaaggagcaattcaagttaagaaagctttcccagaaggtgtatttattttcttagcacctccaagtttatctgaactaaagagccgtattgtcggacgtggtacagagactgaagatgttattgaaaatcgtttaactgtagcgaaagaagaaatcgagatgatggacgcttacgactatgtagtagaaaacgatcaagttgaattagcttgtgatagaattaaagcaattgtggttggcgaacattgccgccgcgaaagggtagcaaaatattataaagaaatgacggagggtctataattatgttaaatccatcaattgactcattactacaaaaaatcgattctaagtacacattagtaacagtagctgcaaaacgcgcgcgtgaaatgcaacttgctaataactgtgttgtagaaaaacctgtttctcataaatgtgtaggtaaagcattagaagaaatcgatgcagaagcattaagctacgtaccaagtgaagataaagtagctgaataagcctttgccttcgacaaaataaaacatagactttataattttctatgtaacggtaacaacctatttacaagtaggttgttatttttttacgaaaggaatgaaatattggtactgacgagctgagaattctatttcagtattataagtttgaaaaagaaagaggacgagtcatatgctaaaagggaaaaagatacttctatgtgtaacaggaggcattgcggtttttaaagcagctgcgttaacgagtaaattgacacaatctggcgcgattgtaaaagtaatgatgagtgagtcggcaatgaagtttgttacgcctcttacattccaagcgctttctcgccatgatgtatatacggatacatttgatgagaaagactcagctgttattgctcatattgatttagcagattgggcggatgttgtacttgtcgcacctgctactgccaattgtattggaaagttagctggtggtattgcagatgatatgattacaactactttgttagctactacagctccggtatggattgcgcctgctatgaatgtgcatatgtatgaaaataaaatagttcaaaaaaatatgatgacattgaaaacgctaggatatacatttattgagcctggggaaggctttttagcatgtggatatgtggcgaagggacgactagaagaacctgaagcaattattgcacggttagaggaagctttctcagaacacaaaccattgcagggaaaaagaatattaataactgctggcccaacacgtgaaaaggttgatccagttcgttttatgacaaatttttcttctggaaaaatggggtatgcgattgcggaagtggcagcgaatttaggcgctgatgttatactcgtttcaggaccgacagcattaaatacaccgttacatgtaacgacagtgcaagtggaatctgcacaagatatgttagaagcggttcttcaacattatcaaaacgtagacgttgtcattaaaacagcagcagttgcagattatcgtccgaaatatgttcatgagaataaaatgaaaaagcaaaatggtgatgctgtcattgaacttgaaagaacggtggatattttaaaaacgttaggtcagaaaaaggataaacagttacttatcggttttgctgctgaaacgacaaatgtagaggaatatgcaacgaaaaaactacgtgagaaaaatgcagatatgattgtcgcgaatgatgtaaaagcgcaaggagctggatttggcacggatacgaatattgtaacaatgtatagaaaagatggaaaagttattgagttgccaattttaatgaaaaaagaggtagctcgtgaaatattgaagcaaattgaaatgatgttagaagatgatcgtttatgaaatttgcaagtgtaattgttgatgtacctgcccgtcagacagatcgaccatttgattacattatccctaaaaaatgggaagatattgtacagacaggaatgcgtgtagtagttccgtttggcccaagaaaattgcaaggttttattattgggattaaagattcggtggatgtagaaagtaagaagttaaagacaatccatgaaatattagatgtaacaccggttttaaatgatgaattattaaagcttggatattggcttacaagtgaaacgttatgctacatgatttcagcttttcaagtgatgcttccaactgcgataaaagcaacgtataaaaaacgtctacaactttgtaaacaggaagaaatagcacctgaaatactatatttatttcaggataaagaagcaattgattttgaagtaatcgagcaacagccacatttataccgaactattcaacaagaaattaaaaatggtacggttgaagtcgtttatcaagtgaaagataaagtacaaaagaagaagcaaagagtggttcagccggagttgccagaagataaattggaattagcggcatttgaactgaaaagtaaaaaacaacaagatgtactttattattttgtggaaaattataaaagtgcaccgttgaaagtaattacagaagagttacaaataacagatgctccaataaaagcacttgttaaaaagggattcatttcagaaaagtatgtggaagtataccgaaatccgtatgacgatgatgattttgaacaaacaaaaccatttccacttacggaggaacaaaaacaagttattacaccgattttatcatcaattacaaatgaaacttataatccatttttactatatggtgttacaggaagtggaaagacagaagtatatttacaatctatagcagcagtgctcaagaaaggaaaagaagctatcgttcttgttcctgaaattgcactaacgccccaaatggtggatcgttttaaaggtaggtttggctcacaagttgcagttcttcatagtgcgttgtctgttggagaaaagtatgacgagtggcgtaagattttaagaaaagaagtgaaagttgtagttggtgcgcgttcagctgtttttgcgccttttgagaatttagggattattattattgatgaagagcatgaatcaagttacaaacaagaagataatccgaggtatcatgcaagagatgtagctgtctggagaggacaatatcataaatgtcctatcgttcttggtagtgcgacaccaacacttgaatcgtttgcaagggcgaaaaaaggtgtttatgaactattaacaatggaaaaacgtatgaatgaacaagctttaccaacggtagagattgttgacatgcgagaagaacttcgtgacgggaatcgatcaatgttttctaaggcgctgcatgaaaaaatagcagatcgattagaaaagaaagaacaaatggtactctttttaaatagaagaggtcattctacatttgttatgtgccgtgattgtgggtatgttgttcaatgtccgcattgtgatatttcattgacatatcataaaatgaatcatcgtttaaaatgtcattattgtagttacgaagagaatatgccaactgagtgtccagcttgtcaaagtacatacattcgtttctttggtacaggtacacaaaaggtagaagaagaaattacaaaactatttccagaggcacgagtcattcgaatggatgtagatacgacaagtcgaaaaggaatgcatgaaaaattattaaaggcgttcggggaagaaaaagcagatatattactcggaacacaaatgattgctaaaggattagattttccgaaagtaacgctcgttggggtgttaactgcagatacgatgcttcacttacctgattttcgggcgagtgaaaagacatatcagctattgacgcaagtaagtggacgagcgggtagacatgaattgccaggggaagttgtgattcaaacgtatacgccagaacattacagtatagagttagcgaagaaccaacaatatgatgtgttttttgaccaagaaatgcaaatgagacgaacaagacaatatcccccatattactatgttgtactcgtaactgtatctcatcctgaattattaaaagcggtacaagtgacggaaaaaattgcctcgtatttacgaacgcattgctcacagcaaacaatggtgctaggaccagttgcttcagcgattccaaggataaaagatagatatcgttatcaatgcatgataaaatacaaacgggaaccaaacttaaagaacgtgctcaaaatggtaaatgaacattatcaagcagaaatgcaaaaagagctacaaatctcaattgattttaatccaacaatgttaatgtagcggagggaaatatggcagttttagaaataataaagcatccaaatgaagtgttagaaacaccatgcgaaagagtaattaactttgataaaaagttagtgaaattgttgaaagatatgcatgaaacaatgttaattgcggacggagtcggtttagctgcgcctcaagtaggtgtaagcttgcaagtagcggttgttgatgtcgatgatgatactgggaaaatcgagttaatcaatccatcaatattagaaaaacgtggtgaacaagtaggtcccgaaggctgtttaagcttcccgggactttatggtgaagtagaacgtgccgattatattaaagtaagagcgcaaaatcgccgtgggaaagtattcttattagaagcggaaggatttttagcgcgtgcaattcaacatgaaattgatcatttacacggtgttttatttacatcgaaagtgacaagatattatgaagaaaacgaactagaataggtgttaaaaggagcggtttttaaatgataaaagtagtgtttatgggaacaccggacttttcagtgccggtgcttcgtcgtcttattgaagatggctatgaggtagtaggtgttgtgacgcaacctgatcgtccagtaggtagaaaaaaagtattaacacctacacctgttaaagttgaagcggaaaaacatggtatccctgtgttacagccgttaaaaattcgtgaaaaagatgaatatgaaaaagtattggcattagagccagatttaattgtaacagctgcatttgggcagattgtaccaaatgaaattttagaagcaccgaagtatggatgtattaatgttcacgcttctttacttcctgaacttcgtggtggtgcaccaattcattatgcaattatggaaggtaaagaaaaaacaggtattacaattatgtatatggtagaaaaattggatgctggtgatatcttaacgcaagtggaagttgaaattgaagagcgtgaaacgacaggctcattatttgataaattaagtgaagcaggagcacaccttctatctaaaacagtacctttattaatccaaggtaagttagaaccgattaaacaaaacgaagaagaagtaacgtttgcgtacaatataaaacgtgagcaagagaaaattgattggacaaaaacaggtgaagaagtatacaatcacattcgcggattgaatccatggccagttgcttatacaactttagcgggacaagttgttaaagtatggtggggagaaaaagtgcctataactgaaccggctgaagcaggtacgattgttgcaatcgaagaagatggttttgttgtagcaacgagtaatgaaacaggtgttaaaattactgaattgcaaccttctggtaaaaagcgtatgagttgttcacaatttttacgtggaacaaaacctgaaattggaacgaagttaggagaaaatgcatgagacaaaatgttcgtgaattagctcttgatggtttaattcaagtggaaaaaagtggtgcatatagcaacttacttttaaataatctaattgaaaaaagtgcaattgatagaaaagatattggtttattaactgaaattgtatatggaacgattcaacgtcgtgacacattagattattatttacagccttttttaaaaaagaaggttgaggcgtgggtaagagtattgcttcgcttatctttatatcaaatgatttatttagaccgagtgccagaaagagcggctattcatgaagcggttgagattgcaaagcgtcgcgggcataaaggaattgctggtatggtgaacggtgtattacgttcgattcagagagaaggtgtaccttctgtagatgaaatcaaggatccagtagaacgtcttgcaattacaacaagtcatccagtttggcttgtccaagagtggacttcagaatacggtttagaaactgcagaaaaaatgtgcgaagtaaacatgttaccccctgtaccaacagcgcgtgtgaatgttgataaggtaacggtagaagaagcgattgagttgttggcaagtgaaggtatagaagcaaaaagtggtgacttatcagatgatgcaattcagattgaaagaggaaatgtagcgcatacagaagcgtttaaaaaaggatttctttctattcaagatgaaagttctatgcttgtagcacgcgctttagaaccgaatacgggagatgcagttcttgatagttgtgctgctccaggcggaaaaacaacgcatatcgcggaacgattaaagggaactggtaaggtcatgtcccttgatttacatgcacacaaagtacgtttaattaaacagcaagcagagcgacttggtctagaaaatgtcgaaactaaagcgctagatgctagaaaagtgcaagagcactttgcaaatgaaacgtttgataaaatattggtagatgcaccgtgttctggatttggtgtaattagacgtaagcctgatattaagttaggaaaagataaaggcgatagtgaaagattatcgacgattcaaattgcaatactagaaaaaatagcaccattattaaaacaaggcggtcgtcttgtttatagtacgtgcacaattgagaaaatagaaaatgaacaagtaatagagaaatttttacaagaacatcctgaatttgaatgggatactacgcttaaagagcgtatgccagaaaaattaactccgtatattgatgaaggtcaagtacaaattttaccgcattattttgcgacggatggcttttatattgcttgtttaaggaagaaggtgtagcatcatggaaacgactgtaagaaaacaaaagaaaaatttagaaacgaagaaaccatcaatttactctttacaacttcatgaaatgcaagattggttaaaggaacaaggagaaccgaagttccgtgctggacaaatttttgattggttatataaaaaacgtgtaaaaaattatgaggatatgtcaaacctttctaaaggattgcgtgataaattgtcgaattcctttgatattactactttaaacacgttagtaaaacaaacgtcttcggatggaacaattaaattcttattccaattatatgacggatattctattgaaacggtattaatgcgacacgaatatggaaattccatttgtgtaacaacgcaagttggttgtcgtattgggtgtacgttctgtgcttcgacacttggtggattaaagcgaaacctagaagctggagaaatcgtagcgcaagtagtagaagttcagcgtgcgcttgatgaaacggaagaacgtgtaagttctcttgttgttatggggattggagaaccatttgataactatgataatttaatgggattcttacgcatcattaaccatgaaaaaggacttcatattggtgcgagacatatgactgtttcgacgagtggaattatcccgaaaatttataagtttgctgaagaagatctacaaattaattttgcgatttcattgcatgctccaaactcagaattacgttcaaaattaatgccgattaaccgtgcttataaattaccagatttaatggaagctattaaatactatgtaaatagaacagggcgtcgtattacttttgaatatggattatttggaggagaaaatgaccaagtagagcatgctgaagagcttgctgcgctcttaaaaggtgtaaaatgtcatgtgaacttgattccggtaaactacgtacctgaacgtgattatgtacgtacgccacgtgaacaaattttcttgttcgagaaaacgttaaaagatcgtggagtgaatgtaacgattcgccgtgaacaaggtcatgatattgatgcagcctgcggtcagttgcgtgcgaaggagcgcaaagaagagacgaggtgacgagatgaaagccgtatttctatcggataaaggaaaagttcgtcaacataatgaagatagtgcaggagtttttcacaatttagatggaaatgtattagcggtagtagcagatggaatgggaggtcatcgagctggtgatgtagctagctcgatggccattcaattattccatgattattggaagcaaacacataatatgaatgagccgaaaaaagtagaacaatggttacatactagtgttgggattattaatgagcgtatatatgaatacgctcagcaaaatgcagaatgtaatggtatgggaacaacgcttataatagctgtttgtacaccaagctttgtgacaatagggcatataggagatagtcgttgctatatggtatcagaaggagaaatgacgctagtaacggaagatcattcacttgtaaatgagcttgtgaaacatggtgaaatttcaaaggaagacgcagagtatcatccgaaaaagaatgtgttattaagagcattaggaacagaagaaaaagttgggttagatgttaaaacgttggtgattgaggaagatgatcaattacttctttgctctgatgggttatcaaacaaagtttctattgatgatatgcgacaaattttacagttaaatgaacagcttgaaggtaaagggcagtgtctcattcaattggcaaatgatcgcggtggagaagataatatcacacttgttcttattgattatgcgggttcgacaaacgaaagtaggtgaagtgcaacgtgctgattggaaaacgcttaaatgaccgttataagctgctgaaaatgattggtggtggcggaatggccaatgtatatttagctcatgatgatatacttggccgagatgtagcggtaaaaatattaagactcgactactcaaataacgaagagtttattaaacgtttccatcgagaagcgcagtctgttacaacgttgtcgcatccaaatattgtgaatatgtatgatgtcggagaagaagatggtatatactatcttgtcatggaatatgtaccagggcaaacattgaagcaatacataattgagcgagggatgttacctataggagaagctcttgatattatggagcagttaacatccgctatggcacatgcccatcattttgaaattgtgcatcgtgatataaagccgcacaatattttaattcgagctgatggaataataaaagtaacagattttggaattgcgacagctacaagtgcaacaacaattacacatacaaattcagtgcttggttcagtccattatttatcaccagaacaggcacgtggcgggatagcaaataaacaatcagatatctattctcttggaatagttatgtttgaattgttaacaggaagacaaccgttttctggcgaatctgctgttgctatagctttaaaacatttacaaagtgaaatcccatcaccaaaaagatggaatgaaaatattccgcaaagtgttgaaaatattatattaaaggcaactgcaaaagatccgtttcaccgatatcaatctgccaatgcgatgaagcgagatattgaaactgcgctatatccagagaggataaatgagcaaccattttacataccggaagatatggaagcgacgaaagcgattccgattattcaacaagaacaattatttgaaaatgtaagtgatgaaacgattgttttaaaagggagtaaggtggaagaaccgataagagcagaagcagctgagttagataagaagaaaaaacggagtaacaagtggcttaaagttttaatttcaacatttttatttttagcaataggaataacattagcacttacggttattccaggattatttattccgaaagatgtgaaagttcctgatgtggctggtatgaaatacacgacagctgtaaatacattagtagaaaagggctttgaggtgacggagcctaatattgtatatacagatgatgttgaagttggggatgtaataaaaacggaccctgtagcaggaagagtcgtaaaagaaaacgctaaaattactatctatcaatcaggtggaaaaaagaaaagtaagatggcaaatttcacaggtcaaaactttgagagtgtaaaagctgagttagaagaaaaatataaacaagttacggtaaattatattgaaaatgataagccgaaaggtgaaattgtagaacaaattccgacgcctgatcagatggttatagaagcggagcaagaactgaaaatctgggtaagtaaagggccttatcaaattagaccaggtgacttttcggggtggactgaaaatagtgtaactggttatttgaatgagagaaaactaacgtcagatataaaacgagagtattcagatacagtcgaaaaaggacttgtaatttcgcaatttccaaaaccaggtacaccattaaaagagggagataaagtaactattattatctctgatggtcaaaagcctaaagtgactaaaacggtaaaagtggacaatatctctatcccatatgagcctgctgtaacaggtgaaaaaaagccgcaaacaatagaaatttataaagaagacatgcagcaaaaaatggatagaccggttgaaacgagaacaattactgaatcagcgactatttctttagaatttgtaattcaagaaggttcaaagggacactataaaattgtacgggatggagtaacgattattgataaagaagtaccatatccaactcaataatagtgaaagtctacttattattattgcctgttatgctgtctacaaagtggacggtatagcaggcaaaaatatatgattcaaaaagctagtaaagtgatgcagctgtaaatatttttttgcatttaatgggaaattcaatgtatattagcgaaagtatatatggtaggttttgaaatcgttatttggaaaatttaaatccattcatttttaaattcagcatcaccttatacaaaaaaggagaattctatgccagaaggaaaaattataaaagctttaagtgggttttattacgtgcagcatgaagaaggggttacgcaatgtcgtgggcgaggtgtatttagaaaaaataaaattacaccacttgtaggagaccaagttgtttttcaggcagataatccaactgaaggttatgtgcttgaagtgtttgatcgaaaaaatgaacttgttagacctcctattgctaatgtcgatcaagcgatccttgtgttctctgcagtagaaccagattttaatcctggactgttagatcgatttttagtgctgattgaatatcataacattaagccaattatttgtattagcaagatggatttagtagatgaaaagatgaaagcaactgttgaagcttatgcgaatgattatcgtgagatgggttatgatgttttatttacttctattaatacttcagaaagtattgatatattaaaaccatacttagaaaattgtgtttctgtcgttgcgggccaatctggtgttgggaaatcttcaatgcttaatgtgctacgtccagaattagagctgaaaacaaatgatatttcttcccatttaggacgcgggaagcatacgacaagacacgtagaattaattgcaattgggagtggactagtagcagatacaccgggttttagttcactagatttcattgatatagaagtagaagatcttacatattgttttccagagttgaaagaagcgagccaatactgtaaatttagagggtgtacacatctttctgaaccgaaatgtgcggtgaaagctgcggttgaagaagggaagattacagaatatcgctataagaactataaacaattcgtagaagaaattagagagagaaagccgaggtattagttatgattaaaattgcaccatcgattttatcagcagatttttcaaaattaggggaagagattaaagatgtagaaaagggcggagcggattacattcacgttgacgtaatggatggacatttcgtaccaaatattacgattggaccgttaattgtagaagcaatccgtccgattacatcattaccattagatgtacatttaatgattgaaaatcctgataactatatcccgactttcgcacaagcgggagcggatattattactgttcacgtagaggcgtgtccgcatctacatcgtacaattcagttaattaaatctcatggtattaaagcgggcgttgtattaaatccacatacgccagtttcagtgattgagcatgtattagaagatatagatatggtattacttatgacagtaaaccctggatttggtggacagaagtttatccattctgtattaccgaaaattaaacaagttgcagacatggtgaaagagcgcaatctagaagtggaaattgaagttgatggtggtgtaaatgctgaaacagcaagactttgtgtggaagcaggagcaaatgtacttgtagctgggtcagcagtatacaatcaaaaagaccgcggtgaagcaattcgcgtaattcgtgggtagtgatgaacttttatcctagtaaggcatttataggataggataaaaatatgtaaaaaggcaatctaccgaatggcagattgcctttttacaatggaaggagaagaaaaaatgattattcatattttggcaggaggaccttcggaatattgcgcagattttgctcgatacgagaatgaggaagtagtgtgggcagcggttgataggggagtataccgtctattaaagaaagggattaccccggctgttgcgtttggagattacgattcagttactgaagaagaattagtatggatgggacagcaaacgaacgaattacatattgttccgcgggaaaaagatcaaacggatttagaaattgcaatcaactgggcattagaacagaagccgacactaattcgtatttttggtgctactggtggaaggcttgatcacggtttggcaaatatacagatgcttttaaaagggttagaagtagagatagaaatgtgtattgtggacaataaaaatgaaataacagttaaaaaaatgggtacacatataattgaagaaaataaaaattttccttatgtatcttttgtaccagttactgaaatagtggaagggattacattgtttggttttaagtaccctcttactaataaaacaatagagtggggatcaacactttgtattagtaacgaactcgttgaggaaaaaggtactttttcatttacttctggcatattaatgttgataagaagcactgattgaagaaacaattttgctccttacatcatatagtgaccaagtggagtaatggggattaggagggaaaccatgagattttatacaattaagttacctaaatttcttggtggaatagttcgtgcaatgttaaataccttcaaaaaagattaaaaaaagcacctatcaccggtgctttttccattgttatagtaaaaaaagagcctatcggctcttttttttattattaaacacgttcgattttgccagattttaatgctctagcagaaacgtaaacacgttgaacttttccgtcgatgcgtacgcgaactttttgaaggttagcgccccacttacgttttgtagcgttcattgcgtgagaacgagagttaccagaacgagcttttcttccagtaatagcacaaacacgagccatttatatttccctcccttgataccttaccatacgtaatttttcaatgttagtcttttatgcgatgctaaaaacactactataatttaacacaactaaaaagagaatgcaacaccgtagaaaaaagaaatcaagaaaatttacttgacactatatgtcaatgaagaaaagttgaaatccataaaaattgcttgacatattatagtggtacatgttgtataataacaatggactattttgctcatcataaaaaagtgtaatttaaaacataaaatatgagagtgaaaagaaagaacgatggaattttctttaaaaagattatatgatagtaactaaagtagtctagctcactttcaccatttatgaagggggaaacgagatgtcaattgaaattaaaacgaagtacggtcaaattgatattagtacagatgtaattgcaacaattgctggaggtgccgcggtagattgctacggtatcgtaggtatggcatcaaaaaatcagttaaaagatggattaacagacattttacgaaaagaaaacttcactagaggtgttattgttcgtaaagatgaagatgaagtacatattgatatgtatattattgtgagctatggtacgaaaatttcagaagtggcacataatgtgcagacgaaagtgaaatatacattagatcaaactgtaggactagcagtagattctgtaaacatctacgtacaaggagttaaagtaataaacttgtaatgtgcattaaggaggaaaatctgtgtcaattcaaaaaattgatggaaaacgtttatcacaaatgatcatgcaaggagcgaataatttaacaaacaatgttcagcttgttgatgcattaaacgtatttccagttccagatggcgataccggtacaaacatgaacttatctatgacttcaggtgcgcgtgaagtgaaagcaaacccttcacagcatgctggtaaagtcggcgtaagtttagccaaaggattattaatgggagctcgtggtaactctggagttattttatctcagttgttccgtggtttctctaaatccattgaacaaaaagaagaattaacaacagttgattttgctgcagcactagaagctggagtagaggcggcttataaagcggttatgaaaccgattgaaggaacgattttaacggttgcaagagaaacgggtaaatatgcagtaacagttgcgaaaaaacagcgcgactttgttttgtttatggaagacgttgtgaaagaagcaaacgcatcgttaaatcgtacgccagatttattacctgtattaaaacaagttggcgttgtagatagcggtggtaaaggtcttgtagtggtatacgaaggatttttagctgacttaaaaggagaaacgatttcttctgatgcaccgacgcaaccatctatgaatgaaatggtacgcgcagaacatcaccgtagtgtacaaagccaattgagtacagaagatattaagtatggatattgtacggagttcatggtgaaattagaggctgaaaaggtgaaagagcataatttctctgaacaaaaattccgtgaagatattagtgtatatggtgattctctactagttgtgtctgatgatgaaattgtaaaagttcatatccatgcagaacatcctggagacgctatgaactacgggcaaaaatacggtagtttaattaagattaaagtagaaaatatgcgtgaacagcatactgctttattagatgaacctactatggttcctgaacaaccagctcaatcgaaagaaaaacaaccatatggtatcgtaactgtagctatggggtctggtattaaaactttatttgagagcatcggcgcaacgaaagttatcgaaggtggtcaaacgatgaatccaagtacggaggatatcgtgaaggcaattgaagaagcaaatgctgaaaaaatcattattttaccgaataacggaaatattgtaatggcagcagaacaagcggcatcagttgtagatcaagaagttattgttgttcgttcgaaaacagttcctcaaggtatggcagcaatgttagcatttaacccagttggaacgttagaagagaatgaagaaaacatgcaagaagctttatctcatgtgaaaacaggtcaaattacgtatgctgtacgtgatacggaaattgatggtgtagcaattcaaaaagatgatttcatgtgtattgcagatgggaaaattgtatctacaaatgctgaaaaagtaggagctgcgaagcaattactagaagcgcttattgatgaagattctgaaatcgtaacgattctacaaggtgaagatgcaactgacgaagaagtagcggagttagttgaatttgtagaagagaaatttgaagatgcagaagtagaagtgcatgctggaaaccaaccagtgtattctttcatcttctctgtagaataagataagattcgttttgaaaataaatggattacttacttgctaatggataagaagtagtaatatgaaggttattactagtttttattcaaaaggctagcatattgaagagagaaaagagccttgctgctaatagtgaggctcttttttacttgttttatataagggatttgagtagtttctcttagaatgcctatgatagaatatataaggtgaaagagagcgattacagatgctaattggtactcaaataaaatgcaataaagaaaataatgtgacggggtgtgagaatcttgaatgatgttgtacaagttcctgttacggatgtaaaggggataggaggagaaacatctgagttactacatgagatgggtatttatacagtttctcatctattagaacattttccgtaccgttatgaagattatgcgatgaaagatcttgctgaagtaaagcatgatgaacgtgtaacggttgaagggaagattcatagtgctcctttgctgcaatattatggtaagaagaaatcgcgtttaacagttcgtgttctcgtcggtcgttatttaattacggcggtatgttttaataggccttactataagcaaaaattaaagttagatgaaacggtaacgattactggtaaatgggatcaacatcgtcaaacaattgctgtatcagaacttcattttgggccggttgtacgtcaacaagaagtggaacctgtttattcagtaaaggggaaacttacagtaaaacagatgcgtcgttttattgctcaagcgttaaaggaatatggagattctatagtcgaagtgttaccggatggtttgttagggcgatataaattattaccaagatatgaagcgcttagggcattgcattttccggtaggacaggaagatttgaagcaagcgcgtcgccgttttgtatatgaagaatttttcttatttcagctgaaaatgcaaacgctccggaaaatggagagggaaaattcaaaagggacgaagaaagagattccgtcagtagaattacaagaatttatcgatgcactgccgtttccattaacgggtgcgcagcaccgagttgtagatgaaattttgaaagatatgacatctccttatcggatgaaccgactattgcaaggtgacgttggttctgggaaaacagttgttgctgcgattggcctttatgcatcgaaattagctcattatcaaggtgctttaatggttcctacagaaattttagctgagcaacattatcagtcgcttgctgaaacgttttcgcattttggtatgaaggtggaactgttaacaagttctgttaaaggtgcgagacgtcgagaaattttagcgaagttagaacaaggagaaatagatattcttgttggaacgcatgccttaattcaagatgaagttatatttcataggttgggtctcgttattacagatgaacagcatcgatttggtgtagcgcagcgccgagttttacgggagaaaggtgaaagtccagatgtattatttatgacagcgacaccaattccgcgtacgcttgcaattactgcatttggagagatggatgtttcgataatcgatgagatgccagcaggtagaaaggtgattgaaacatattgggcaaaacatgatatgttagatcgcgttctcggttttgttgaaaaggagataaaaaaaggaagacaggcatacgttatttgtcctctaattgaagaatctgagaaacttgatgtgcaaaatgctatcgacttacatagtatgctgacgcatcattaccaagggaaatgccaagttggattgatgcatgggagattatcgtctcaggaaaaagaagagataatgggacagtttagtgaaaataaagtgcaaattcttgtatcgacaacagttgttgaagtaggtgtgaacgtaccgaatgcgactgtaatggttatttatgatgcagaacgtttcggtttatcgcagcttcatcagcttagagggcgtgtcggccgtggtagtgagcaatcatattgtttattaatagcagaccctaaatcagaaacagggaaagaaagaatgcgcataatgactgaaacaaatgatggatttgtattgtcagaaaaagatttagaattacgaggtcctggagatttctttgggagtaagcaaagtggcttaccagaatttaaggttgctgacatggtacatgattatcgagcgttagaaacagcaaggcaagatgcggcgatactagtagattcagaagcgttttggcacaatgatcagtacgctgccttgcgtacgtatcttgatgggacaggggtgttccaaggagagaagctcgattaaagggagtcaacaaaattttttgttgcattctacttttaatgattatatactactgttagtacctagtcataaaaatggatggtgcggtatgaaaaaaagaagaagtaaaaaagaaagacaagagttattacaacaaacaatcgaatcaaatccttttattacggatgaagatttagcggaaaaatttcaagtgagtatacaaacagtacgacttgatcgtatggaattgtctattcctgaattaagagagagaattaaacatgtagctacaaagcaacatgaagaagatgtgaaatctttaccgttagaagaggttgttggagaaattattgatattgaattagatagacatgcaatctctatctttgaagtaaaggtagaacatgtatttaaaagaaatcaaattgcccgtgggcatcatctgtttgcgcaagcaaactcactagctgttgcagttattgatgaagaattagctttaactgcaaagtctaccattcgatacattcgccctgtaaaattaggagagcgtgttgttgcaaaagcgcgcgttgaagatgtagagaatgataagggacggacggttgtcaaagtgcgtagcttcgttggagaagaacttgtttttacaggcacttttgaaatgtatcgatctagtaattatagtgaggaaggtaacaacttatgaaaatcgcaatagatgcaatgggcggagatcacgctccaaaggctgtagtattaggggcaatgaaagctattaaggaatattctgatttacatattacgttagtagggaaagaagaggaaattcgtcaatacttaacgagtgatgaacgaattactattcttcatacagacgaaaaaatagaatcaacggaggaaccagtaagagcggttcgtcgaaaaaaacaagcttcaatggtgcttgcggcacaacaagtaaaggatggagaagcagacgcttgtatatccgcaggtagtacaggagctttaatggcagctggattatttgttgtcggtcgtatggaaggaattgagcgaccagctttatcgcctacaatgccaactgtagatggaaaaggttttgttatgttagatgttggagcaaatgttgatgcaaaaccaattcatttatatcaatatgcagtaatgggatctgtttatgctgagaaggtaagaggaattgaaaatcctcgcgttggactattaaacgttggaacagaggatggaaaaggaaacgagctttcaaagcaagtatttgcaatgcttaaagatgcgccaattaatttcgttgggaacattgaatcaagagatttattgcaaggtgtagcagatgttgttgtatgtgatggttttacagggaatgtagcgttgaaatcattagagggaacagcacttgcgctattctctatgttgaaagaacaattaatgagttcatttacgagtaaattagcagcggcggtattaaagccaaaacttatggtattaaaagataaaatggattattcggagtatggaggagctgcattatttggattgaaagcacctgtcattaaggctcacggttcttctaatgaccagtcgatatttagtgcgattcgtcaaacgagagaaatggtagcgaaagaagtaattcctacgatttcaagcgtaatggagaaagagtcactccaataagaggaggatttgaaatgggaaaaatagcatttctttttccgggccaaggttcacaggcagttggaatgggtaaacaattagcagagaataataaagaggttgcaaaagtgtttgcaaaagcagatgaggtgttgcaagattcactttcagaagtgatttttgaaggaccgcaggaaaagcttacattaacaacaaatgcgcagcctgcattattaacaacgagttttgctattttgacagctttgaaagagtatgacattacacctgactttgtcgctggtcatagtttaggtgaatatagcgctcttgtagcagctggtgcattaacttttgaagatgcggtatatgctgtaaggaaacgcggggaatatatggaagaagctgttccgggcagggaaggtgcaatggcagctatattaggtgctgacccacatatgctgaaacaagttacagaagaagtaacaagtgaaggatatgcagtgcaaatcgctaatatgaatagtacgaagcaaattgtaatttctggaacgaagcaaggcgtagaggttgcttctcaaagagcgaaagaaaatggtgcaaagagagcaattccactaaaagtaagtgggccattccattcttcacttatgaagccggcagctgagaagtttcaaagtgttttgaatgaaattacaattcatgatacgaacattcctgttattgcaaatgttacggcggatgttattacacgtggtgccgacattcaagaaaagttaatcgaacagctttattcgcctgtattatggtacccgtctattgaatgtatggtgaagcagggagtagatacatttattgaaattgggcctggaaaagtacttgctggacttatgaagtcaattgattcatcagcgaaagcatatgcgatatatgatgaagagacattaaaagataccatttcaaatttgagaggagaaaactgatgttaaaagggaaggtagcattagtaactggcgcttcacgtggaattggtcgcgcgattgcgatcgatttagcgaaacaaggggcaaatgtagtagtaaattatgcaggtaatgaacaaaaagcaaatgaagtagtagatgaaattaagaaattaggttctgatgcaattgcggtaaaagcagatgttgcaaatgctgatgatgttacaaatatggtgaaacaaacagtagatacatttggacaagttgatattcttgtaaataatgctggtgtaacaaaagataatttattaatgcgtatgaaagaagaagaatgggatacagttattaatacaaacttaaaaggtgtattcttatgtacaaaagcagtatctcgttatatgatgcgtcaacgtcacggtagaattataaatatcgcttctgttgtgggtgttataggaaacccagggcaagctaattatgttgctgctaaagcgggtgttattggattaacaaaaacatctgcaaaagagttagcaagtcgaaatattactgtgaatgcaattgcgccgggctttattgcgactgatatgacggatgtactagatgagaatattaaagctgaaatgttaaaagttattccagctgctcaatttggtgaagcgaaagatatcgcgaatgctgtaacgttttttgcttctgatcaaagcaaatatgttacaggtcaaacgttaaatgttgatggcggtatggtaatgtaataaaagaatcgatttcacctagtttttttggtcaatatttaatataatatttgaggggaggtgaatggaatggcagatgttttagagcgcgtaacaaaaatcatcgttgatcgtttaggagtagaagagactgaggtagtaccagctgcaagcttcaaggaagatttaggagcagactccctagatgtagtagaacttgtaatgcaattagaagatgaattcgaaatggaaatttctgatgaagatgctgaaaagattgctactgttggcgatgctgtgacttacatagagagtcatctataatgcttaagtgaagtcccgttttttagcggggctttctggcttatatctggagggacctatgccgtaccgaaaatatagagaaaaaaaatacgaaacaaaatatcgtgaagcatttaaagtgtttcaagaaaagataggtattacgtttacagatgaaaaattattgattcaagcatttacgcattcatcgtatgtgaatgagcatcgaaaaaaaccgcatgaagataatgagcgtcttgaatttcttggagatgcagtattggaactgactgtatcacagtatctgtttcaaaaatatccgacaatgagcgaaggagagttaacaaaactacgtgcagctattgtatgtgagccatctcttgttcgttttgcgaacgaattgtcatttggcagccttgttttattaggaaaaggtgaagaaatgacaggtggacgtgaacgaccagctttattagcggatgtctttgaagcgtttattggtgccctttatcttgatcaagggctagaaacagtttgggaattcttaaaagaaattgtatatccgaaaattaatgagggtgctttttctcatgtgatggattataagagtcagttgcaagaattgattcagcgtgatggcagtggcaatgttgagtatcaaattttgcaagaaaaaggaccagctcacaatcgagaatttgtgtcacgtgttacgttaaataacgtagctttaggtcttggtagtggtaagtcgaaaaaagaagcagagcaacaagctgctgcagaagcattgaaaaaattaaaagaacaactataaggaatccccctttgaatgagggggattccttatgcatagaatgaaactttctttttgtttataaagaaaaagaaggtaaatccgtataatacttgtttttatatagagaacatttataacggcggagaataggaggaaggcctttcgtgtttttaaaaagattagaaatagcagggtttaagtcttttgctgagcgtgtatctgttgattttgtcccaggtgtaacttctgtagtaggacctaatggaagcgggaaaagtaatattactgatgcaattcgctgggtacttggtgaacaatctgcaaaatcattacgtggtgcaaagatggaggatattatttttgcaggcagtgatacgaggagagcggttaatgttgctgaagtaacaataactttaaataatgaagatcaacgtttaccaattgaatacaatgaggtgtgtgtaacacgtcgtgtatctcgttcaggtgatagtgatttttatattaataaacaatcatgtagattgaaagatattatcgatttatttatggactctggtatgggaagagaagctttttcaattattagccaggggaaagtggaagagattttaagtagtaagtcaggcgcgacacgtttctctataagcgtttagacgtgaagtgagagtgttgctgaaagattttgtacatgcttaaacaagcgaaaatgtacatgtttatcttgacatttacagagttactcatttttctatcactcctttcatttcgtcctaattactataaccatttaggaggataatcatgagttagaagttaggcacttaattttcttcgataatgtaagtaaaatattccatacataacaaatagcatgagtaaaacttgtaactctacattttcctttaaaatagctgcgatagggtctggtaagtacggtgatttatcgtttgtgtttaaacctaaccatttatttaagaggctaatggtacaaaacataaaaacaccggaccagcttgccgtaattgctttttgtttaatttttgtttcacgttcatcatctgtaatccaaggattagcagttttatcccgcattaacgggcagtaagacccccacctcaaaattcagcggaggcaaagaagttaggtggggatcaactgtccgtaaaagcccgattggttcaactaataatccgtgggggatgaacaaaacccccacggattaaagtttcactttatcactactaaaaaatccatttatgtatccccatataatcattccaattaagatggttatccatttcatattttttgattcacttctcccttgtaaaaagtgttttacatatcagtttttcatatagcaggaataaagtataagatagggaagaaatatgtaagaggatttcataaagagaggaggaagaggatgaaaatcgtttttgttcggcatggtgaaggtgaacatacaacggatttaccagaaagtttacaagtgtttgacccaccattgacgagagtaggaaaggctcaagctaaattacttcaatgcaatgtgccattgcaagagacggatatattaattgttagtcctacacttagaactttgcaaacggcgacaatatggagtgcgaaagttgcttgtcaaaaactagtccatccatatgtatccccacgtatttttccttatcgagaaggagcgaaaacattaccgtgcgattatatagtagatcagggaatgataacaaagttatttccgcatttttcgatagagaaaagctcaaataatcagttatggaaggaaggtataaacactatttcagagaatagttttcagcaaatagtagatgaatttcttctttggtgttatgaactgggtgctgaaagaatttgcattgtatctcacgatggaacaattacagcatataggcaatatttacagaaagtcgttttaactagatcagattttttgaaagaaaggggcatatatgaaatggatttatcccataaaattctgattgataagggctgattataggatgggggttgtatgttgaatattgcattagtagttggttttaattcggatttagaagcgcaatcaattcgagcatctcttgaatattttggtgcaagggttgtgacatattggattggtagaccgaaagattttgtggaagttctttctggaaagaacttatttaacaatattaattatattattttttgctttcatggtgaagaagggaagtttgtcatggaagagttaggcgaagaagtatatgaacaagatgaaccgagaggggattttggtacagaagaaatttataaatatgcaaaattgcataatacacatattgtaaatagcgggtgcacgttaggggagcaaaatctagcaaaatcttttttacatagtggtgcgaaatcatatattggatcgattgattatgtagatggaaatgcagcacttatgtttactatacgcttattttatggggttattaaccatgggaaaacgttagaagaagcgtttcaagaagcgagtttaattgatgaggagacacatacatttcgattctataattagtgtgaaacaagtttattctatattcgaataaacttgtttcacatttaactcacatttttttacatttttttcaatgaaaatggttatcacttgtggtatgatatgttcaagtttttacaggtaataaaagttactatataaacgttagtttttaatgtttcatacgcatgtcacagattattcataattaacgtttgaaaaataagtaactaatgttattatattatctgtaactaacttaattacaactttaggaggaagatatggttattcaatttttaagagaaaacaaagcagtttcttttgcattagcagtaattcgagtatatcttggttacacatggttaatggctggaatcggtaaactacaaggaaaaggattcgatgcaacaggttatttgcaaggggcaattgaaaaatctaaaggtgcacaaccggctgttcaatcttggtgggcatcattcttacaagaatttgcaattccaaatgtagatttgtttaatacacttgtaacatggggagaaattttagtcggaattggtttaattgtaggctgtttaacaaaaacagcggtcttttttggtcttgtaatgaacttttcctatatgtttagtgggtcaattggtgtgaaccctgagatggttatcttatctatgtttgttcttgtttccggtatgaacgctgggaaatttggaatggatggcttcgttatcccgaaagtattaggatcaaaaactccaaaacgccaaaagcaagctgcttaatatatgaaaacgggtatctcattttgagatacccgtttatgttatttttcaactttaatcggattgttcttaaagaaatcttttacatacccgacaaattcttgtggttcttggcgaaatggtgcatgataacctttttcaataatatgtaaagtgctattttttaagaattgatgatacgtttctccttctttccaggaaacgctactatcatttctgccccatataattaaagttggctgttttatttcatttgcattaattttaagacgtctaggccataatttcattttattataatgctcttcatcattacgtttgaatttcactttgctttcatcataatctgtaatagaagaaacggcatttaaatcagtcgacaattgtggttttggtgagccttgtttattaacgaatgtatgagggccacctgtagcatcagttaaaataaggtgagtaactgcttcaggatataaatatgttaaatttagagaaatttctccccccatggaatgccccagtattgcgaatgaatcataccctagttttttcattaatttataatacaaatttgcatgagttggaaaagaataataaaaatccattggcttagatgagcgcccgaatcctaaagcatctacagaaataattgtatgatcttttgctaaatcggagtaaatcttttgaaaaccatctgatgaccctccaaagccatgaatcataagtaaaggtggtttttcattaccaatctttttaaagtaaatggtttgaccatctatttctaccattttttcctcggtagctagtttcgctgtaattgtatttttaacttgttttacttgttctactggcttttctgctgcactacatcctactaatagtgtaagagtaagacaacctaccataaaatagctaaatcgcttcaattaggtgtctcctttctaacataacgctgtatctatcatagcaaatagcatattacgatttccaggaagttggctaccattttttatcataagaggtgaaaggagcgtttcttggaaattttctgtttgaagaaattgacgaaatgtaaattgtgagtgtggaacatcaattcgtactataccattccaacattcacatatcttttttaataattggatagcatcttcttcttgctgggcgataagtggattgatacataatatattgcccttttgtatgcataatgaaaaagcttctatacagttatttctttcaattttaaaagagtgtacggcccttggtaatagcaaagagtaaagtagagaacgattcataccagttgcaatttgatccagagaagtaacaggtataaggtcttcttcttgtacttgttgtaagtgagaagggtacgtcttaatagtttgcttttcaaaacgatgaatcgttgttgctgtttgaaatccgcatgatgtgtatagaggttcgccagcttttgtcgcaataagtgcaatgggttgttttggatgaatttgttccaagcaatgatttagcaacatgcgccctattccgcgtccttgaaaattagggtgaacaattaacataccaatggaagcgaagttacttgtaaagggaaatactcctccagtcgcaatgagtttgttttcatgaatgtaacctacaagtgtgccgatagaaagatacatttcgaattgttttttcataaaaatttcatcgtgtaaccatccaacagatttgcaaagattaagtaattcaaaaataaaagattcatttagctttactattttcataaaggctcaccgcatttctatttattttcataaacatagagtcaaaatgtaaaaaaagagatttacgttaaatgaaatccaacttgtttatatttaaattgtaaagggcggaatgattgatacaaaaagacaaacttatacaaattataactgatatttacataagttaacaaaaaatttacatacagctaattttctcttaatagtcttccattaaatttgatagtgggaaatgaataacctaattagggggacaagacagtgaaaaagtttgtgaaaaaagcatggccatttgcagttgtggcatcattagcagttacttcggtagcaacatggaattttactcgttctagtgaggttaatgcagatgagaacggaagcaatgcaaagattaaaaatgttatcgtattaattggggatggtatgggtccttcatatatgacggctcaccgttatatgaaagataatccaaaaacctttgaaatggaatctacagaatttgataagcatcttgtaggaacacaaaaaacatacccagaagatgaacatgaaaatattacagactctgcatcggcagcaacagctatgtcagcaggaattaaaacatataatgctgcaattgcagttgataatgataaagcggaagtgaaaacagttcttgagcaagcgaaagaaaaagggaaatcaacgggactcgttgcaacttctgaaattacacatgcaacaccagctgctttcggtgcgcatgacattagccgtaaaaatatggacgcaattgcaaatgattattttgatgagaaaattaaagggaagcataaggtagatgttatgcttggcggcggcgtaaagaactttgttagaaaagatcgtaatcttacagaagagtttaagaaatctggttatagctatgtaacggatcgagatcaattgttaaatgataaaaatgatcaaattcttggtttatttgcaccaggtggattagataaaatgattgaccgcaatgagaaaacaccttcattagaagaaatgactaatgcagcaattgagcgtttgaacaaaaataaaaatggtttcttcttaatggtggaaggaagtcaaatcgactgggctggacatgataatgatattgttggtgcaatgagtgaaatggaagacttcgaaaaagctttcaaagcagcgattgagtttgcgaaaaaagataaaaatacgttagttgttgcaacggcagatcacgctactggtggcttatctttaggtgccaatggcgagtataactttaaagtagatccaattaaagctgcaaaacgcacaccagactttatggcaaatgagattgcaaaaggtgcaaatgtagaagaaacattgaaaaagtatattgatttacaattaactccagaagaaattcaagctgtaaatgatatagctccgtcaaaagatgtaacaaagattgataatgcaattgaagatattttcaataagcgctcggttacaggctggacaacaggtggacatacaggggaagatgtgaacgtgtatgcatttggtccaggtaaatacttgttctctggcgttcaagagaatacaaatatagcgaaacgtgtctttgatattgttggtggcggtgatccgaataaaggaagacgctaattaagagcgaaagtgaggcgaactgcctcgcttttctttttaggagttggaaatatgaaaaaaatatttgcgaaattaagattccttctagcatttgtagtattactagttggatgtcaacaagaagagaataatgtagcacaaaaatctactactaaaaaaactgaggaaaaggtacaaataacaaaagaagaagagaaatctattcaagatgttattcatacatttgtgcgaacgaccaatgaaaaaaatcttgcagaacatatggagttattttcaaagaagatgcctagtgctgaagacttaaaaacacaaaaagaagccgcatttcaaaagggaaataagaaaattgaattggaacatatagatatgaaagttagtaaagtagggtatgttattgttgaaacgaaagaaaaggaagtagacgacagtattactcttcaaaagaaagtacagtatgcccttggaaaagaagaggataaatggaagattgaagaggttcgaacaatagagaaaaaataacgtgaaactttaataagtgtggagtcatacttcccaaaaatgatagaaaaaaggttctcattggcgagaacctttttttatagtggtagcataatttgatttgaacatgcctcaatatcatcaatatcttgacgaattgtggccattttattatccagatcttcagctttcattgctgcatcatgtagttcatcttttaaatactccggtattttcccttcatatttataataaagtttgtgttctaaacttgcccaaaagtccattgccagtgtacgtaactgaatttctgcaaatacatcttttgtaccagaatttagtgataaagggtatttaatgatcatgtgtaaacttttatatccgtttcgttttgggttagcgatataatcttttacttctatgacttccatatcttcgcgtttttgaatgacttctttcaaatgatagatatcttctacgaagcaacatgtaatacgaataccaataatatcttgtaaatgtgtttgagcattttcaactgttggtaataagcttttgcgctctagttttttaataatactttcaggttgttttagtcttgtttttatatgttcaaacgggttgtaatcctctagaaattgagcttcccggttcataatttcaaatttagtttttaactcttctaaagcaaatgtatatggtaatacaaaagctttccagtagttaactgttgattgattatattccatttatatacacaccttttcctatttgcaagtgaggtcgttattatactaaataccaaatcatataagcgcaagcagcaaatgatgagatcataaagcgatatttagttttcatactttcaactcctttcgagtaagattttatataaataaacgtgattgttaataagttcactatgtacagtttctatagtaatagattcgtgtgaatttcgtatgaactaattgtttcagctttttgtcttttttgctgttaatcataattattattcggatttaaagtgtttttatttgatttatctatttgtataaattaatgtatatttaaatttacagttatcgaggaggatatatggtgaactttgaagaattagcaattgctagacgttctgcaatgaaatttatacaaggtatagaaatccctgatgaggattttaaaaaaatatttgagttaactaagctttctccatcttgctataatttgcagcacacacattatgttgtaattcgtgatcaagagcgaaaagaaagattaaaagaattagctttcggtcaatataaagtatcgagtgcatcagcggtagtgctcgtttgtggtgataaaaaagcataccaaaatgttgaaaatatttacttcggtatgaaagttttaaaaatgattgatgaatgtgaatatgaagatacaattaggcaaacgaaaggtttatatgaaggaaaaggagagcgtttcatggaggatgaagcgattagaaatgcttcgttaagcgcgatgacttttatgtacgcagctaaatattatggctatgatacatgtccaatgattggtttcgatgaaaaagcagtacaaagtgaattaaatatgccggagcatatagtacctgttttaatgattacgataggaaaaagtgatacgactaaaactcgcccacgaggatatcgaaagccgattagtgagtttgttacatacgaatcgttttaataaagtgaaacttttaatcagtggggggtcttactgcccgttaatgcgggagaaaatttatttaactataaaaacaaggggattctaaatggaatcttcttgtttttgcaattgacaaatggaatgaagttttataatatataaatcgtaatcattacgttttagttgcgatttttgaaagaaaggagaattaaatatgcgtgtaaatattacattagcttgtacggagtgcggtgatcgtaattacatttctaaaaaaaataaacgaaacaatccagaacgcatcgaattaaaaaaatattgtccacgattaaagcgagtaacgttacatcgtgaaacgaagtagaagactagagatatctctagtctttttttatagttctttggttttgtttgttataattaccttaaattgtaataaagggagcggtatgatgaatcaaaaagataaagaaagaaaagagcaagtggctcatattattaatattccagatgaatatagtcttgttgtagatgatcaagaagggggtgatgacccgtatcatctattatggtgggagcataaagaggatcaggagagaacgatacaaattacattgaatagacatactggtaatttaattgaatttaggatagatgatgaaaatcctttttcaagtggcaaggaagcgatagaggagaagaaggcaagagagattgcaaatgcgttcttgaaaaaatatacaaaagaaggatatgaattctatacatatgtaacggttaaggacgacaggcgcggttggaaagaagtaaattatatgcaagaagtgaatagctatccattgccgaatacagggtgcgttgtgcgagtgcactcttcaggtaatgttgtgcattttcattacaatggacaaaaagctatagagaaaaaaccgttatggccaagtgaaattgttgaggagaatatcgttttagaaaatttgaaagctagacaagatatgagacttgtatttatagatttaacatactcttcatgtgagtatgaaaacggggaagaagtaaaagggtaccatcttgtatatgaaccagagcctagtcatgcgtttattgatgcaagtacaggtaaagatttatttggaccagatcattataaattgccttcggctgtagctgttgaaaaatcgaaaaaaggtaacgaacgaggtgaagtattcgaattatttgactggaataaagaaggttttacaaaagtagatgagacagaaaatgatgatgaaataaggatgaaatttgttccgaaagaggaattacaaaaacagaaagaagaaaagaatccatatttaatgaatgaattctttaaaaagcatttaccgatgttgaaatataataatttagttagcgttacaattgataaattaaccaatgaattaactggttttataaaactgacagatgataaagaagtaaagcaaatactgtctagagaggaatgtttacaaagagcacttcaatttttagaacgagttattccagatatcacacaatatctgcgtctttgggaggaacgtgaagaagcagaagatgggattgaaagatttatcttttctgtatatataaatgatattccggcagagtataaccaatttatgattaacatcaatgcagaaaatggtgctgttatgcactactcgggggagtctagcaactttataaaagaattgctcacatatgaaataacaccaaaagtaactaaagaaaaagcgttagaaatatacagagaggctatccgagttaaattagaatggtttttagatcatgatgcagaggaaacgaaatacaaactactttacaaacaaacgacagatgaaaaacataaagaaccttttaattgtaggcgggaaattcgttatattgatgcccaagcggggagaaagatttggagtaagtaaaataaaagagttatttttcaaagaaaataactctttttatttttatactttgcctgttcgtttttcaaaagtaaatgtgataggaagattggaataagaactatcacttttaaatattactttccattctttagtatgggctttaatttcaaaattaagaagattcatcgctctacgtttatctatttctaaaaacatattatgaatctctggttcttgctgtaaattaagagcctttagtgtgactgtaaatgtgaaaaaattctgtccttcatatactatttttgatatttttgttttttgtttatttaacagcacataaaaacggtctgatggagttaattgtacagagtcatcagtaatttcattttcgctattatgaagttcaactaagtaagatgtactatgggaagaatcttttttgcttgtaatctgtaattcagtaggaatcatcggtatttcataaaaatcatttcttattatgttgttgtaatcctctgaaaatttacgaacttcttttgggaaagagtcatcttgtgtacttaaaaaagttttgttttgctttggaatttttttactaaaatttaatgtttctttaaagtaataattggatccagttaaaaataaacaactacagattaataaaaaaattcgatacggattttgaaagtgaaagaataatagtatacatgtaataattccaattacatagaaaataaagataagtagttctagttttgagtgaaaggagaaaccatagttatgaaaaaattttattccagttataatttgagctccaaaaaataaagaaattccaaattgaaaaaataataaatcaggccctcttttaataacaaaagtaatgaacgaaatgaaaagtaaaaatacccctaaataaattgttacatttaataatcgttctaatgtaatcatgaatagtgtcccctttaatagcatattcatatataaataacaattttatttaattataatataacaataaaatattttaaatgttagaagtgttgagttttataaataaactgtacagacacaaacaacctcacgcccacatacacataataaagaccactattttggcggaggtgaaaggtttgagtctattcgccgcaattggatatatggttcgagaagtgtttgtctttgtttcttatgtgaagaacaatgcgttcccgcagccgttatcatcagatgatgagagaaagtacttagagttaatggagcaaggtgatgctcaagcgagaaatcttttaattgaacataatttacggcttgtagctcatatcgttaaaaaatttgagaacacaggagaagatgcagaagatttaatttcaattggtacaatcgggctcattaaagcgatcgagagctattctgcaggaaagggaacgaagcttgcgacgtatgcagcacgctgtattgaaaatgaaattttgatgcatttacgtgtactaaagaaaacgaaaaaagatgtttcacttcatgatccgatcgggcaagataaagagggtaatgaaatatcgcttattgatatattaaaatcagagtctgaagatgtaattgatatgattcagcttagtatggagttagaaaaaattaaagagtatatcgatattttagacgaaagagaaaaagaagtgattgtgaaacgttttggacttgggctagataaggagaaaacacagcgggaaatcgctaaggcgcttggtatttctagaagctacgtatcacggattgaaaagcgtgctttaatgaaaatgttccacgagtttgtaagggcagagaaagagaaaaaagcgaaagagtaaagtgtattagaagcagccatatttaaaatgggctgctttttttattgtaaataagaaaagaaaacgcgttatgctaagaagaaatacacgttcactgttgaaaatgacggattctatctgtaatattagaaggtgctaaataatttaagaataataccatacttagttttctgtatatataataaggctgctttatatgatatgtgggaataagaaccaattttacatatgatatagaaagaaaagaagggaaaactaaagttatagactgattagggggtttcgcaatttgcgacgtacattatatcgacttatgatagaacttacaaatggtcgctttacttcttatatattacgtaaatttgcacaatctcgtttgagctctatcattattccatcgtacgcgaaagtttttcaaattaatcaagatgagatggaaaagggtttgaaggaatatagaacattgcatgaattatttacgcgtaagctaaaagaaggaaagcgtagtattgatacagatgcatcgagtatcgttagtcctgttgatggtgtttttgcagatcatggtcctattgaggatacaaaaacatttgatattaaaggaaagcgctattcaatcgtggatatgctaggtaatgaagaacgtgcaacgcgatatgcaggcggtacatatatggtaatttatttgagtccaagtcattatcatcgcattcatagtccgctttctggttctgtgactgaaagatttgtactcggtagaaaatcatatccggtaaatgcagctggtatggaatacgggaaagaaccactgtcaaaaaattatcgttctgttacagaagtaagcagtgatggcgagcatatggctcttgtaaaagtaggtgctatgtttgttaatagtattgagcttttgcatgagagagacactgttcaaaaaggtgaagaaatggcatactttacatttggttcaacagttgtgttattgtttgaaaaagatatgatagaagtagtgcaggaattaaagagtggacaagagcttcgtcttggtgaaaaaatagctactcgcttagctcataaataaagaaaagcttttataaccgtaagtaagagttatgggcaaagatacttaatgatgaaatcccctagatgggagtacttgtttattcgagagccatcgtaggatggctctttttacagggcatctaataatttatcctttaactgtttgattggtaagggctgattaaactttcactttatatgtaatcaagatgatttgacaagcttgtcctctaatgagcgtctaatgatttcttgttttataagtaaaatgaagtcgggatttaattttagttcttttgctttataataagactcagtgagtaactcagtggataactgttccatatgttttgttttcaaggtgagtcacctcctaataatataaggattgattcgttgatgcatttaatgtaccaaaaaaatatgacagtcacaaacgagtggttatccacatacctaggtggataaagtgtgtatagtttgttagtaaattccaaattaactgcaaaattaatgtggaaaatgtgtacaattttatccacaggttatatatcgaaaaatgttgtcgaaaaattttatgaaaaatcctcaaagaggtgaaagaaattgaaactatttttaccaaatgaatatgtgaaaaatgtatatcatgttcaaccagaagatttaaaaaaacgtgggattaaaggcgttattactgacttagataacactttaattgaatgggatcgtcccaatgcaacgccgcaacttgaaaaatggttcttggaaatgaaagagcaaggcattcaagtaacggtcgtttcaaataataatgagcaacgtgtgaaagattttgctgatccattaggtattccatttattcatagtgcacgtaaaccatttgttcgcgcatttaagcgtgcgatacaagagatgcgtttgcagccagatgaagttgtagtaattggagatcagttactgactgacgtgcttggtggaaaccgagtaggccttcatacaattttagttgtaccggtagcacaaacggacggattagtaacgcgctttaatcgaaaaattgaacgaagaattatgaaaaatatgaagaaaaaaggtttaattaactgggaggaataaagtttgactgaaacaattaaatgtattggttgcggtgtagaaattcaaacagaaaataaaaatgaagtggggtatgctcctgcctcatctttagagaaagaacaagtcatttgtcaacgttgttttcgcttgaagcattacaatgaaattcaagatgtatcgttaacagatgatgacttcctacgcattttaaatggaattggaaaatcagatgcattagtagtcaaaattgtagatatttttgattttaatggtagctggttacctggcttacatcgtttcgtagggaataataaagtattacttgttggaaataaagctgatttaattccaaagtcagtaaaacatgataaagtaaaacattggatgcgctatagtgcaaagcagctaggattaaaaccagaagatgtctttttaattagtgcagcgaagggacaaggaattgctgaactagcagatgctattgagtattatcgcggcggcaaagatgtttatgttgttggatgtacgaatgtaggaaaatcgacatttattaatcgtatgattaaagaatttagtgatgagactgaaaatgtaattacaacatctcatttcccaggaacaacactggatttaattgatattccattggacgaagagtcttctttatatgatacgccaggtattattaaccaccaccaaatggctcattatgttggaaagcaaagcttaaagcttattacaccaacaaaagaaattaagccgatggtattccaattaaatgaagaacaaacgttattctttagtggattggcacgttttgattatgtaagtggtggtcgtcgtgcatttacttgtcacttctcgaatcgcttaacaatccatcgtacaaagcttgagaaagcagatgaattatataaaaatcatgccggggatttattaagcccaccaacgccagaagaattagcaaatatgcctgagctagtgaaatacgaatttaatattcgtgaacctaaaacggatgttgtattctctggattaggatgggttactgtgaacgaaccaggagcaaaaattgttgcacacgtaccaaaaggagtaagtgtttcactacgtaaatctttaatttaatatggagagggatttatgaaacaattatatggtgtaatcggaaatccaattggacattcattatcacccgttatgcataacgatgcatttgaacacttgaatatggatgcccattatcatgcgttccttgttgaagaggaattgctaggggaagcagtaagaggtttaaaagcattaggtatttcaggatttaatgtaacaactccgcacaaggttgctattatggagtatttggatgagattgacccattggcaaggaaaatcggtgcagtaaatacagtggttcataaggatggaagattaattggctataacacagacgggattggttttgttcgagcgctgcagtcaattagtaatgaaccacttcaagggaaacgtattttgttacttggttcaggtggtgctagccgagctatttatttttctcttgctgatgtaggtgtaaaagagattgatgtagccaatcgtacagtagataaggcgaaggaacttattgctgcacgtacggccgatgttaattctgttgctttgtcgttagaaaaagcgacagaagaacaaggaaattatgatattatcattcagacgacaacgataggtatgcatccgcacgtagaatatacgccattacaaatttgttcgttaaaaaaaggaacgattgtatcagatataatttataatccatttgaaacgaaaattttatgtgaggcaaaagagcaaggtgcaatcattcaaaatggtattgatatgtttgtttatcaaggagcacttgcatttgaaatgtggacaggacgcaccccaaatatcgagagaatgaaacaattagttatagaaaagcttggaggctaacatatatgttaacaggaaaacaaaaaagatttttacgtgcacaagcacatcatttaacaccaatttttcaagtaggaaaaggcggagtaaatgaaaatatgattaaacaaattgcagatactttagaagctcgtgagttatttaaagtaagtgtattacaaaactgtgaatttgatcgccgtgaggttgcggaagaacttgcaaaaggtgcacgtgctgaaatcgttcaagtaattggaagcacaatcgttttatacaaagaatcaagagaaaataaacaaattaagcttcctcgataaaaagattagcatgcgctatttttatcgctgatgcgtaatgatgtagagagcgaaaccaattgaacttttattaatagcaactctcttcattcctaaccgaggagagttgctgtatataaaaggaaggggcgtttcttttgaggaaaattggcatcattggcggtacatttgatccgcctcactatggacatttgctaattgcaaatgaagtatatcacgctttgaacttggaagaagtatggttcttgccaaaccagattccgccacataaacaagggcggaatattacaagtgtagaaagtcgtttacatatgttagagctcgcgactgaggcagaagaacacttttctatttgtttagaagagctaagtaggaagggcccatcttatacgtatgacactatgttacaattgacgaagaagtatccggatgtgcagtttcactttattattggtggggatatggttgaatatttaccgaagtggtataacattgaagctttacttaatcttgtaacgtttgttggagttgcaagacctgggtatacattgcatacaccatataagattactacagtggaaattccggaatttgcagtttcttcatccttattacgtgagagatataaagagaagaaaacgtgtaaatatttacttcctgaaaaagtacaggtatatatcgagaggaatgggttgtatgaatcgtgagaatgcactgcatattgtcaaacaacaaatgcatgaaaaacgttatatacacacaattggtgtaatggagacagcgattgagcttgctaagttatacggtgtggacgagaaaaaagcagagatggcagctatattccatgattatgcgaaatgtagagcaatttcagaaatggaagagattattaaacgtgaagatttgccgaaagatttactttgctataacaaagagttatggcatgcacctgttggggcatacttagtagaaaaagaagtaggcattacggattctgaaattttgcaagctattacatatcatacaagtggtcatgagaatatgacgatgttagataaagtgatttatgtagctgattacattgaacctgggcgaaagtttccagaagtggaagaggctcgtaaactcgcatatacggatataaatcaagccctattatttgcgttaaagagaacaattcaatttttaatggaaaaagatcagacgatttatccattaacattccaaacatacaatgcagttatcaaggaggaaatgagtaaatgaacgataaagaattattagtattagcggcaaaagcagctgatgataagagagcagaagatatggttgtcctaaatatgcaaggtatttcaccaattgcagattatttcattatttgtcacggaaattcagataaacaagtgcaagcaattgcacgtgaaattaaatcaaaagcacatgagttccaaatcgacgtacaacgtatggaagggtttgacgaagcacgttgggtattagttgatcttggagatgtagttgctcatgtattccataaagatgagcgtaatcactataatttagagcgtctatggggtgatgtgccacgtgaagatattacagaagagttaggccaatgaaatacgaacaatttgcattgttgtacgacgaactaatgaatgatgtcccttatgataaatgggtggaatttacagagggaagtttacagcaggcaggtatgaaagaggcaaaaattcttgatgtagcatgcggtacaggtaatgtaaccctgccgcttgtgcaaaagggttacgatttaataggtgtcgatctttcagaagaaatgttaacagtcgctcagcaaaaactaggcggagaagggcattttattcctttttaccaacaagatatgcgcgagcttgatgttccgggtgagtttgactgtgtaacgattttttgtgattcattaaattatgtattgcaagaagatggagtacaagaaacatttagaagagtatttcaccatttacgtcaagatggtttgtttttatttgatgtacactctttatataaaatacatcatgtatttcaaaatgaaacgtatacagtgaatggagaagaaatatctcttatttggaattgcttccctggtgaagaatcaaatagtgtagagcatgatttaacattctttgttcaagatccagaagaagatgtgtaccatcggtttgacgaatgtcacgtgcaacgtgcatatcaagtggaagagttaacgaaatggcttgaagaagcaggttttacagtgcttcgtgtaacaggtgattttgagcgacttgaagttacagaacaaacagagcgtattttcttcatggcgaagaaaaacggataaaaacaaaagcaaccgagaaggttgcttttgttttataaagaagatgtatttttagttctagcataatctaaagatcgtatgcgtaaagtgtgggaatagtagttgaagtgaaaatgtattgtaaaaaagtaagtatttataaaaaggatttggaatgaaaatgacgtatttattatgtgtgtttattgaattgctgatcaacgcattctaaatcttcatcaaatttttcatgtgttcgctcgattaacttatggaacatatctccaacgtgttcttctaaaacccgaatgccttccccagtaacgccgcctttcacgcaaaccttttcttgtaaggtaggtaatgtgaagatttctttttcaagtaatttccccatccccacgaccatttcacttactaaagtagtagcctcttcgtgtgtaatatttgttttatctacagcagcgttaatgaagcattgtagtaaataactaaagaaagcaggaccgcaacttgctatatcagatgaaacgcgcgttatatcttcttttattacaagaggtgtagaaatgtttttgaatagacgaagtagtttttgttgccattcttcagagcaattatctccaaatgtaaatagtgaggcgccagagagagcgcgatttgtgatacttggaatgatacgcgcgacgtggcaaggtacgagagtctctaattgtgatggagatattggacttgtaatagaaactaagcacgtttcatcagaaaaatgttcagcgtatttttttaggatagggtatatatctatcggcttaacacaaataaaaataagttgtgattgttcgattacttccgggattgtttttgctatctgaacagaagggtatttttcttttatatgatatgcttttgcgggcgtccgattaatgattgtaaggcaagaaggtttgacagcacgggtttctaaaaatgcatcgattagtatatttcccatgtttcctgtccctataattcctatgttcaaagtttcatccctccttcgtaacagctttctcctaaacaatatgaatgatgttataaatttatgattagaggtgtaaaatgatgtgggattttccgaaaaagtggttaggtttagtagctattattggaactttactttttcttgttttttggaaaacgaatcagaatgtagaacgaacgcctattacaatgaatgtacaagagaaggagatagaaaaaaagggtaaaccgaaaatatcggatacaaaggaacagaaaagaacaattataattgatgtgaaaggagcggttagtaaagaaggggtatatgaaatgaaggaaggagatcgcgtaaaggatgcggttcaaaaggctggtggttttttatcagaagtagatatgaaaaaagtaaatttagcacaaattgtacaagatcaaatgcttctttatataccgagtaaaaatgagtcagaacaaggggtgcttacttcttctaaggaagatggcaagattcgaataaatacagcggcgaaagaacaactagaaaaaattacagggattggctctcgaaaggcagaaagtattttgaaatatcgagaagaacatggtccgtttcagaaaatagaagatttattagagattgatgggattggtgcgaagtctcttgaaaagataaaaggtcaaattattattccgtaaaagattgacgaagtttttcttctttcgctacactacaagtagacaaaaaagtaggtgaaaaatatggaacgaatttcatgggatcaatattttatgacgcaaagccatctactatctttgcgtagtacatgtacaaggcttgcggtaggagcgacaatcgttcgcgataaacgaattattgctggtgggtataatggttcaattaaaggtggcgtacattgtatagatgatggttgttacgtaatcgataatcattgtgttcggacaattcatgccgaaatgaatgctttattacaatgtgccaagtttggtgcgaaaacagaggaagcagaaatttacgttacgcatttcccttgtttacaatgttgtaaggcaattattcaaagtggtattacagcggtttattatgcgcaggattataaaaatcatccatacgccatagagttatttgaacaagcgaacgtaacagtgaagcacgttccgctagaatatgatattgctgcattagaggagcaaaaacgttatacagagttgaaagaattatttgcgtctttagaaaaagataatttatcaatggaagaattacagcatgtattcacgaaagcaaaaatgatgctataaggagtgagtataagttgcaggaacaatgggggtatgttgcaatctcatttataataggggttgcaattgccttttcctcgtcacttttattgatagttttttgcctctttttaaatgttttcttctgtttatatcgcacttcgcgtaaaaccttcattttttgtattgtagcgtgctttaatagcgccatatacacttcctatgttcaaacgtggaataagcctctaggggagtcctatggagttacaagaggggttatacaaaatgcaccgcttgttaatggggatcgcctatcttttcaatttgaagatcagaataaaaatatagtgcagttaagttatagaatcaaatcagtcttggaaaagaaaaaaatgcaacaattatacgcagggatatcatgtgtattcgagggtgagaggaaagaaccggaaacagctcggaattttcatggttttaattaccgtgattatttatacaaacaacatattcatttcacatttgaggctacatatatttctgaatgctataaaacatcactgtcgctcacgcaatggattcttcttttgaggcaacaagtaatctcgaaagttacagaaatgtttccagagcaatcaggtgcttttatgaatgcattactatttggtgatagacaacaaatgacgtttgaagtggaagagcaatatcaacaatttggtcttgtacatttgttagcaatttcaggttcgcacattgtactgttaatggtgatagtatattttattttgctaagaagcggtgtgacaagggaggtagcaacaatttgccttatcgtttgtattcctttgtatatggttttagcaggggcgtcaccctctgttataagagcttctataacaggagttttgatgttaattgcttttatgtgctcgattcgtttatctagtttagatgctttaagtgtaacagctatatgcatgcttatatatgacccttatcttgtttttaatattggatttcagttttcttttgtaggtagcttcgctttacttttgtctgctccgttattgttagagagtagcaacggagtaatccgaaattctatttatatttctatcatttcacagctcgttagtactccgattttgttataccactttggttatttttctccatatagcattctcctcaatctcttatacgttccgtttttatctatcattgtattaccatgtagcattattattttactgtgtatgccaattgtcccgtttctcgcaaaaggatttgccgatgtattatcaataggcttgagtatgtctaatgattttctaagttattgtgaaagtttaccatttacccagcttatcttcggggaaacgcccttcaatcttgtagctgtatattgcgccagtattgtcagcatattgatggtttgggaacggagagcgccgaaaaaaatagtttgtatagttgcgagtgtatttctttttattagcacatgtcattatatatatccatattttagaggcggcggaagtgtaacatttattgatgttggacaaggtgatgcaatattaattcgccttccgtatgataaagggatttatcttattgatacaggtggaacgcttcgtgtgaataaggaagaatggcaacaaaaaaagcatgaattttctgttggaaaggatgttttaataccctttttacaaaaagaaggtattaaaacaattgataaattaatcgtaacgcatggagatgcagatcatataggtgctgcgcaagaattattatcatatatacctgtaaaagaagtggtatttggccgaaagggaaaagatgcagtattagaaaaagtagtaaagaaacaggcattagaaaaggaaatgaaaataactgaagtgggggaaggggagagttggagtgtaaatgaagcggaatttttcgttttagctccaaaaggaaaagaaaaaagcgaaaataacgcttcaattgtaatatgggcaaaatttggagggttgaagtggctatttacaggcgatttggaagaagaaggggaaaagattttagtagaggcatatccagatttacaagtggatgttttaaaagttgctcatcatgggagtaatacgtcatctatagagccttttttgaacgtcatacagcctcgtgtagcgattatatctgttggtaagcagaataggtatggacacccgcataaagaagtgatagagcgttttgagaagatggggagtgcgatatggcgcacggacaagcaaggtgctatttcctatgtttttaaaggggaaaatggaacctttaaaagtaaaatcacatatgataaaacacataatagatgaaaaagagaagactgccatgaagtggcagtctttaagaaccgataaatttaataacagttgcaatgatgaaaagtgttgcgaaaaaaccaaatgagacgataaatcctacccctgaatcaatagcgtcattgcgtttactttgaacgttttgttcaaaatcattcatttagaatccctccccaacattccactttagtataaaatattgtcagaaaaaaatctacaatttccatatgaagagaaaacgagcttttttgttacttgtaaatcatgaagtaatgtgagtttttcgtttccaagcatgttaacagttggcacttatactcaaatttttattgcgaataataaagggaaggtgattaccgcacaccaataagaaacccggggcttattgcgtggcgtttaatataaataaagggacgggttataaagcctgttcctttgtacttgtaaaacaaaagctagggcattagtataaatatatattgccaagttagggagtaggaaaaagtatgagtgatatacataaaaaaattaaaaagaaacagtttgctccgttatatttaatatatggaacggaagctttttttataaatgaaacgataaagcttattacgacagaagcacttgaagaagaagatcgagagtttaatgttgtgacatacgatttagaagaagcgtatttagaagatgtggttgaggatgcgcgtacgcttcctttcttcggagaacggaaagtactgttaataaaatcaccgctatttttgacttcgcaaaaagaaaagttagagcaaaatataaaaattttagaagaatacattggtgaaccttctccattttctattcttgtttttgttgcgccttacgaaaaacttgatgagcgaaaaaaaattacaaaactattaaagaaaacagcagatgtagtagaagcgaatgcgatgcaagtacaggatgttcagaagtggattgttgctcgtgcagatgaagtgcatgtgcatattgataacgcggctgttagtttgttgctagagcttgtgggaagtaatgtaacgatgttggcgaaggaaatggacaagttaacgttatacgttggtatgggcggagagattacgacgaaacttgttgcagagcttgtgccaaaatcagttgagcaaaatgtatttgctttgacagaaaaagtggtgaaaaaagatattgcaggtgcaatgcaaattttggatggattatttacgcagcaggaagagccgattaaattgcttgcgttattagtgagtcaattccgcttgttgtatcaagtgaaagagctacagcaacgtggttatggacaaaatcaaattgcgtctcatattggtgtacatccgtatcgtgtaaagttagcaatgaatcaaacgaagtttttctcttttgaagaattaaaaaaagtgattatagaattagcggaagctgattatagtatgaagacgggaaagatggataagaagcttgtgctcgaatttttcttaatgcgattaaatcatatgtgatgacacaaaaaagttcatgcacttagtgcatgaacttttttgtatataaaaaaacgatccaaatggatcgttttttaaacgccttacgcgtttacttgtttcgctaagcgagatttttgacgagctgcagcgttttggtggataagacctttacgagctgctttgtcaagttttttagaagcagttttgaaagcttctttagcattttcaagatcgttattagtaactaaagcttctacagttttaacagcagaacgcatgtcagacttgatagaagcgttatgtgcacgacgctcttcgctaagtttagcgcgtttgatagcagatttgatgtttgccatacttttcacctccctggtgcaatcgaatgactcgattcttacatagaacaagtgatattctatcaaacggtgaagagaattgcaatagtatatccatgaaatttcacgtaaaggaaagaatgaccttatataactttgggaaatctaacgatatttactatgaattacggaggagatacgatgaaagaaccattagatttaagtaaatatagcattagaactgaccttgctgtagaagctcatcaaatgttgcaagaaagccaagaagaacaaaaagggatacagggagttattgtaaaagagagagaagaagaaggtactataattacaaaagtaacgattgatgaagctgcctctgaagcgatggggaaaaaacctggaaattatttaacacttgaagtacaagggatacgtcagcaagatacagaacttcaacaaaaagtggagcgtatttttgcaaaagaattttcttgtttcttagaagaggttggagttacaaaagaagcaagctgtttaattgtaggtcttgggaattggaatgtaacaccagatgctcttggaccgatagttgtagaaaatgtattagtaacgagacatttgtttcaattgcagcctgaaagtgtagaagaaggatttaggcctgttagtgcaattcggccgggggtaatggggattacaggaatcgaaacgagcgatgttatttatggaattattgagaagacgaacccggactttgtaattgcaattgatgcattagctgctcgttctattgaacgagtaaatagcacgatacaaatttctgatactggaatccatcctggatcaggggttgggaataaacgtaaagaactaagtaaagacacattaggtatccctgttatcgcaattggtgttccgactgtggtcgatgctgtttcgattacaagtgatacgattgattttattttgaaacattttggtcgagagatgaaagaaggaaataaaccttcacgatctttgttaccagcgggattttcatttggagaaaagaaaaaattaacagaagaagatatgccggatgaaaagagcagaaatatgtttttaggtgctgttggtacattggaagaagaagaaaaaagaaggctgatttatgaagtgctatctcctcttggtcataatttaatggtaaccccaaaagaagtagatacttttattgaggatatggcgaatgtaatagcgagtggtttaaatgcagcgctacatcatcaaattgatcaagataatacgggagcatatacacattgaggggaacagatgattatggtttgagtcgctttgcgcttttgtgtatatgtagtgtagctttatgtttacttatgatgatagcaggagtggcacttgctaatcatggtttgaaaagtatgaaaggctatcagcaattgtcatatgaacaaatagctcatatgacagggacagaaagtacaggtgctgaatcagaaattttgggtagctcgttttcggcctcagaaaaacaacagcaattagaacgtttaagaagttttaatgttgtagaaggaattgggatggcggtagcaagtgtagcttatgaaatgacgaagttcgggacggatatagttgttgggaaaataaaaggaatttttagctaagagtaacatgggaggcggttgttttactgatttgtaggacagccgttttaaaatttgaaaagggtttgtctcttatggtttattcgcataagatatagatagaatgatttgtatcgtaagcagcacgagttttcattgaatctttgttgctctattgatataatcagtgctagtgtatattggcgagactattaggagttgagaacatagatgaataaagaagaaagagcaaaaagacagtccaaaattcgtaatttctctattattgctcatattgaccacggaaaatcaacgttagcagaccgtattttagagaaaacaaacgcgttaacacaacgcgaaatgaaagctcagttgcttgactctatggatttagagcgtgagcgtggtattacaatcaaattaaacgcagtacaattaaactataaagcaaaagatggtgaagagtatattcttcatttaattgatacaccaggacatgtcgactttacgtacgaagtatctcgtagtttagcggcttgtgaaggcgcgattcttgtagtagatgcagcgcaaggtattgaagcgcaaacgttagcaaacgtatacttagcgcttgataacaatttagaaattttaccagttattaataaaatcgacttaccaagtgcggatccagaacgtgtacgtcaagaggtagaagatgtaattggtttagatgcatcagaagcggtacttgcttctgcgaaagctggaattggtattgaagaaattttagaacaaattgttgaaaaagtaccagctccgtcgggtgattcagaagagccattacaatgtatgattttcgactctttatatgatccgtaccgcggtgtaattgcttatatccgtgttgtaaatggaacagtaaaagttggcgataaagtacgtatgatggcaacgggtaaagaatttgaagtaacagaagtaggtgtatttacaccgaaaactacgcaacgtgacgagttaacagtaggtgatgtaggtttcttagcagcatcgattaaaaatgttggtgacacacgtgttggtgatacgattacacatgcgaaacgtccagctgcagagccgttagcaggttaccgtaagttaaatccgatggtattctgtggtctgtatccaattgactctgctcgttataacgatttacgtgatgcattagaaaaattagagttaaacgattctgctcttgagtttgaaccagaaacatctcaagcgctaggatttggtttccgttgtggtttcttagggcttcttcacatggaaatcattcaagaacgtattgaacgtgaatttaagattgacttaattacaacagcgccaagcgttatttataaagtttatttaactaacggtgaagatgttattgttgataacccatctaatatgccagatccacagtctatcgatcgtgtagaagagccgtttgtgaaggcttcaattatggttccgaatgactatgttggagctgtaatggagatttgccaaggtaaacgtggaacgtttattgatatgcaatatttagatgaaacgcgtgttacattaacatatgaaatcccgttatcagaaatcgtatatgacttcttcgatcaattgaaatcaaatacgaaagggtatgcatcatttgattacgagttaattggctataaaccatctaaacttgtgaaaatggatattcttttaaataatgaacaagtggatgctttatcatttatcgtacaccgtgattcagcgtatgaccgtggtaaagtaatcgtagagaaattaaaagaattaattccgagacaacagtttgaagtgccaattcaggcgactatcggaaataaagttgtagcacgttctacaattaaagcgatgcgtaaaaacgtacttgcaaaatgttacggcggtgacatttctcgtaagcgtaaacttcttgataagcaaaaagaaggtaaaaaacgtatgaagtctgttggttctgtagaagtaccgcaagaggcatttatggctgtactgaaaatggatgacaactaatatttgaaataaaaaagaagtcgtttgtgcggcttcttttttctgtataattactttttagacatctgagcagctctcatttacaataatgagagagctttttagttcatatagagttaggagattgttaatgtccgaaaatattcgaaaagatattcaagataaaatacaaaatggtaattttaattgtgaaaaggaattgacgctttctattattagtggaaagtggaaagttgtgatactgtggcatcttggtgtggaaggaccacatcgtttcagtgaattacaacggttattcccaagcatttctcataaagttttgtcgaaccaattaaaagagttaatggaagatggaattgttgatcggacagtatatcccgaaattcctcctcgcgttgagtattatatgacggaactaggcatgtcacttttaccgatcgttgaaatgatgtatgattggggaaaaatgcgaatggaacaaattcgtaatacgttagagaagtagagaaccctccggagtgcggaggttttctttttagaaaggtaggagttatatttggtacaagctgcatatattcatattccgttttgtcagcacatttgtcactattgtgattttaataaagtgtttattgaacgccaaccggttgatcaatatttagattatttagagaaggaaataataaatacggttcaaaaaattccgtttgatagtataaaaacgatttttgtgggcgggggaactccgacagcgttaaatatggaacagacaaaaaaattactcgagattattaatcgtcatttgcgtccgttcgccccaaattgtgaattaacatttgaagcgaatccaggagatctgccgaaagagaagttgaatgtactgctagaaggtggagtgaatcgaattagttttggtgtgcaaacgttccgtgatgaactgcttgagaaaatcgggcgcaagcatacgagggaagatgcattcctcgcgattcgagaagcgcaggaagtaggatttaaaaatattaatgtagatattatttatgctttgccaggacagacgatagaagatgtaaaagaaacattagatattgcttttacgcttggtgtacaacatttctctgcatattcattaattgtagaacctaaaacagtgttttataacttaatgaacaaagggaaattgcgtcttccgggtgaagaccatgaagcgaaaatgtatgaaatagtaatggatgaaatggagaaacacggttataaccagtatgaaattagtaatttctcaaaaggtgacaataaaagtagacataatctcacatactggaataatgaagagtattatggatttggagctggagctcatagttatgtgaacggggaacgtattcaaaatgtaggtccgctgaagcaatattttaataaaattgatgaaacaggatttccgtatttagatgttcacaaagtgacggagaaagaaagaatggaagaagagctgttcttagggcttcgaaaaacaaaaggtgtttctaaaacggcgttccgcaataaatttaatatagagatggatcaagttttcgcgaagcagttacaaagcaaccaagagcagggattgcttgaagaggaagatggacatgtgcgtttaacgcgaaaaggaaaattattagggaatgaagtattccaatcatttttgattgactaattaaatgttccataggcgtgaaaaagtttcattatttcgtgacgtttccgttgacaattgaatgtcaattttggtaagttattaatagatttagcactcaaagacaaagagtgctaacagaggtgatgatgagatgcttacggaacgtcagctcttaattttacaaacaattattgatgactttattggatcagcgcagcccgttgggtctagaacgttggctaaaaaagatgaaattacatttagttcagctactattcgaaatgaaatggcggacttagaagaattaggttttattgaaaaaacgcacagttcttctggacgtgttccttctgagaaaggctaccgattttatgtagaccatcttttagcaccgcaaaacttaccgaacgctgaaattgtacaaattaaagatttatttgctgaaagaatttttgaagcggaaaaaattgcacaacaatctgctcaaattttatcagaacttacgaattatacggccattgttcttggaccgaagttaagtacaaataaacttaaaaatgtacaaattgtgccgcttgatcgtcaaactgctgtcgctattattgtaaccgatacagggcatgtacaaagtaaaacgattaccgttccggaatctgttgatttatcagatttagaaaaaatggttaatattttaaatgaaaagctatctggcgtaccgatggaagaacttcataataaaatctttaaggagattgttacagttttacgtgggtatgttcataattacgatagtgcaataaaaatgttggatggtacatttcaagttccgttatcggaaaagatatactttggaggaaaagcaaatatgctttcgcagccagagttccatgacattcaaaaggttagatctttacttaccatgattgataatgaagccgaattttatgacattttgcgtcataaacaagtcgggattcaagtgaaaattggtagggaaaactcttcgacggctatggaggattgtagtttaatttctgcaacatattcgatcggcgaagagcaacttggaacaattgctattttaggtcctacgagaatgcaatattctcgtgtaattagtttgttacagttatttacgagacaatttactgatggacttaaaaagtaaatgagagtaatacattcgctcaagtgatgaaattttcattgctgtgtgtaatatataatgcttaggtaatcatgctatgcatgatacctaataccttttaaggaggtgaatattgtggaagagcgtaacgaacaagtggtagaagaagtaaaagaagcgcaagttgaagaagctgtcacaccagaaaacagtgaagaaactgtagaagaaaaaagtgaggctgctcttttacaagaaaaagtagatgagctacaagcgaaactaacggaaacggaaggtcgcacattacgtctacaagctgattttgaaaattataagcgccgtgtccaaatggataaacaggctgctgaaaaatatagagcacaaagtctagtttcagacatcttgccagctcttgataattttgaaagagcaatgcaagtggaagcgactgatgagcaaacgaaatccttgttacaaggtatggaaatggtgcatcgtcaattgttagaagcgctgactaaagaaggtgtggaagtgattgaagctgttggtaaacagtttgatcctaatgaacaccaagctattatgcaagtggaagatagtgaatttgaatcaaacgcggttgtggaagaattccaaaaaggttataaactaaaagaccgtgtgattcgcccatcaatggtaaaagtaaatcaataatttacataaaactaggaggattcgccatgagtaaaattatcggtattgacttaggtacaacaaactcttgtgtagctgttatggaaggtggagaaccaaaggttatcccaaatccagaaggaaaccgtacaacaccttctgttgtagctttcaaaaatgaagaacgtcaagttggggaagttgcaaagcgccaagcaattacaaacccaaatacaatcatgtctgttaaacgtcatatgggtacagactacaaagtagaagttgaaggtaaagattatacacctcaagaaatttctgcaatcattttacaaaacttaaaagcttctgctgaagcatacttaggtgaaacagtaacgaaagctgttattacagtacctgcatacttcaacgatgcagagcgtcaagcaacgaaagatgctggtcgtattgctggtttagaagttgagcgtatcattaacgagccaacagcagcagcacttgcttacggtttagaaaaacaagacgaagaacaaaaaatcttagtatatgacttaggtggcggtacatttgacgtatctatccttgagttagcagacggcacattcgaagttatttcaactgctggtgacaaccgtcttggtggcgatgactttgaccaagttatcatcgatcacttagtagctgagttcaaaaaagaaaataacattgatttaagccaagataaaatggcgcttcaacgcttgaaagatgcagctgaaaaagcgaaaaaagatctttctggtgtaacacaaactcaaatttcattaccattcattagtgctggagctgctggtccattacacttagaattaacgttaacaagagcgaaattcgaagagctttcagcaggtcttgttgaaagaacattagagccaactcgtcgtgcattaaaagacgctggttttgctccaagcgaattagataaagttattcttgttggtggatctactcgtatcccagctgtacaagaagctattaaacgtgaaactggtaaagagccatataaaggtgtaaaccctgatgaagttgtagcattaggtgctgcagttcaaggtggcgtacttactggtgatgtagaaggcgttctattattagacgtaactccactttctttaggtattgaaactatgggtggcgtgttcacgaaattaatcgagcgtaacactacaattccaacaagtaagtcacaagtattctcgacagctgctgataatcaaccagcagtagacattcacgtattacaaggtgagcgtccaatgtcggctgacaacaaaacgttaggtcgtttccaattaactgaccttccaccagcaccacgtggtattccacaaatcgaagtaacattcgatattgatgcgaacggtatcgttaacgtacgtgcgaaagacttaggaacaagcaaagagcaagctattacaatccaatcttcttcaggtctttctgatgaagaagtagaacgtatggtacaagaagcggaagcaaatgctgacgctgaccaaaaacgtaaggaagaagttgaacttcgtaacgaagctgaccaacttgtattccaaacagacaaagttgtaaaagatttagaaggtaaagtagatgcagctgaagttgcaaaagcaacagaagcgaaagaagcattacaagctgcaattgagaaaaacgagcttgaagaaattcgtgcgaaaaaagatgctttacaagaaatcgtacaacaattaactgttaaattatacgagcaggctcaagcagctgctggtcaagcagaaggtgcgcaaggtgcacaagatgctggcgcaaagaaagacaatgtagttgacgctgagtttgaagaagtaaaagaagacaagtaattcaattgtaaacataataagtaagatgacaaaaagtcaaagtcaagcgtgccttgactttggcttttttcacgaatgagaagcgatgtgtgaggatcttaagtttttcgctttgcatactgtaagtgaggaaactttgttgcaaagcactttctttcggtgttaaaattacgtttatgtgaaagattcgggggttgtaaatttatgagtaaacgagactattatgaggtccttggacttagcaagggcgcttcaacagatgaaattaaaaaagcgtatcgtcgtttggctaaaaaataccatccagacgtaagcaaagaagaaaatgcaattgaaaagtttaaagaagtacaagaagcatacgaagtgttaagtgatgatcaaaagcgtgcacagtacgatcaatttggtcatgctggtgcaaatcaaggattcggtggatttggcggcggaggagacttcggcggtggcttcggttttgaagatatatttagttctttctttggcggtggcggcggcagacgtcgtgatccaaatgctccgcgccaaggtgctgacttacaatatcaagtcactttagattttgaagaagctatttttggtaaggaattaaatgtggaaattccagtagaagatccatgtgatacttgtaaaggtagtggagcaaaaccaggaacttcaaaagaaacatgtaaacattgttcaggctctggtcaagtgagtgtagaacaaaacacaccgtttggtcgtatcgtaaatcgtcaagcttgtggtcattgttcaggaactggacaaattattaaagaaaaatgtacgacatgtcacggttcaggtaaagttcgtaaacgtaaaaaaatcaatgttaaaattccagcgggtatcgataatggtcaacaaattcgtgtgtctggaaaaggtgaagccggcgtaaatggcggaccagcaggagacttatatgttgtcgttcatgtaagaagtcatgaattcttcgagcgtgaaggagatcacattatttgcgaaatgccattaacatttgcgcaaatggcgcttggtgatgaagtggaagttcctactgttcatggtaaagtgaagctgaagattccagcaggaacacaaactggaacagaattccgcttaaaaggaaaaggtgctccgaacgtacgtggatacggccaaggagatcaatatgtagtcgttcgtgttgttgtaccgacgaaattgacttcgcagcaaaaagatttattacgtgaatttgcaggacaagaagagcaggatgatagtttattcggaaagcttaaacgtgctttcaaaggggaataatggaaataaaaaatggagttggtaaattgtgaaatggtcagaaattagtattcttacaacagaagaagcagtagaagctgtctctcatattttacatgaagctggtgctagtggagttgcgattgaggatccagcggagttaacgaaagagcgcgagcaacaatatggtgaaatttatgcattgaacccagatgaatatccggcggaaggtgtattaataaaagcgtatttcccgcaaacggattctttacatgaaacgattgcaggtgtaaaatcatctattgatgtgcttccatcttacgacatcgaaattggtactggaaatattaccgttaacgaagtcaatgaagaagattgggctactgcttggaaaaaatattaccatccagtacaaatttctgatacattcacaatcgtaccgacttgggaagaatatacaccatcttctcctgatgaaaaaatcattgaattagacccgggtatggcgtttggtacaggaactcatccaacaacaacgatgtgtatccgtgctttagaaaaaacagtacagccaggtgacactattattgatgtaggaacaggttctggtgtacttagtattgcggctgcaaaattaggtgcgtcttctgttcaagcatatgatttagatccggttgcggttgaaagtgcagaaatgaatgtacgtttaaataaaacagatgatatcgtgtctgttggacaaaatagtcttttagaaggcattgaaggtcctgttgatttaatcgtagctaacttattagcagaaattattctattattccctgaagatgcagcaagagttgtgaagtcaggtggattatttattacatcgggcattattgctgcgaaggaaaaagtaatttctgaggcgttagaacaagctggatttacaattgaagaagtgttacgaatggaagattgggtagcaattattgcacgaaatgcgtaatatagattttagtctataatgaaaagggggagtctctcactataaggtgagagacttgccgtttgttatatgaaaaatgataacgtttcgttcttttcgtaagtgttgacttacgaaaggaacgaaactctactaaggtgattatatgcaacgttattttgtagaagagaaatatgtaaatgagacaagtattcgcattgtaggtgatgacgtacatcatatcgcaagagtgatgcgtatgtcagctggtgatcatatttattgctgtgtaaacggaaaaacagcagtatgttcaattgatgaaattaccagtgaatttattaatacggctattgtagaatgggtagaggcgtcaagtgaacttcctgttttcgtgacgattgcaagtggactgccaaaaggagacaagctagagttaatttttcaaaaaggaactgagcttggggcagctgcattcttaccatttcaagcatctcgctctatcgtaaaatgggatgcgaaaaaagctgataaaaaagttgagcgtttaagaaaaattgtgaaagaagctgcggaacaatcacatagaagtgaaattccagaagtacatgctccggcatcatttaagcaattgctttcaatgagtggtgagtatgatgtttgtcttgttgcttacgaagaggaagcaaaacaaggtgagaaatctaattttgcgaaagctttaacgacaatgaaaccaggtcaaaagctattgattgtatttggcccagaaggcggtttagctgaggaagagattacagcgcttcgtgaacataaatttgtaccatgtagtttaggaccaagaattttaagaacagaaacggcgccgttatacgcgttaagtgctgcttcgtatcattttgaattgatggggtgatgatcaatgtcaactgttgcgttccatacgttaggttgtaaagtaaaccactatgaaacagaagccatttggcaattgtttaaacaaggtggttatgaaagaacagaatatgaaaagaaagctgatgtatatgttattaacacatgtacagtaacgaatactggggacaaaaaaagccgtcaagtaatcagacgtgctgtgcgtcaaaatccagatgcagttatttgcgtaacgggatgttatgcacaaacatctccagctgaaattatggcgattccgggtgtagatattgtagttggtacacaggatcgtgaaaagatgttaggttacatcgaagaattccgtaaagagcgtcaaccaattaatgctgtccgtaatattatgaaaacacgtgtgtatgaagaacttgatgtaccttatttcacggatcgtacacgtgcgtctttaaaaatacaagagggttgcaataacttctgtacattctgtatcattccttgggcgcgtggtttaatgcgttctcgtgatggaaaagaagttattaaacaagcacaacaattagtggatgcaggctataaagaaatcgtattaacgggtattcatacaggtggatacggcgaagacataaaagattataacttagctggattacttcgtgatatggaagcggaagtagggggattaaaacgtcttcgtatttcttctattgaagcgagtcaaatttcagatgaagtaattgaagtgttagataaatctgaagtagttgtacgccacttgcatattccgttgcaatctggttctaatactgtattaaaacgtatgcgtcgtaaatatacgatggagttcttccaagagcgtttagatcgtttgaaagaagcgttaccaggccttgcgattacatctgacgtaatcgttggtttcccaggtgaaacagaagaagaattcatggaaacatacaatttcattaaagagaaccgcttctctgagttacatgtgttcccttactcaaaacgtacaggaacacctgcagcacgcatggaagatcaagttcctgaagatgtgaagaatgatcgtgttcatcgtttaattgagctatctaatcaattagcgaaagaatatgcatcagcgtttgaaggtgaagtgcttgaaatcattccagaagagcaatttaaagacggcgaccgtgaagggttatatgtagggtatacagataactacttgaaaattgtatttgaaggatcagaagaattaattggtaagctagtgaaagtgaaaattacgaaagctggttatccatataacgaagcgcaatttgttcgtgttcttgaagatgatgtaaaaaaagaatcagctagcgcataaaaagagcgtgcaaccggaaacggtttgcatgctttctttatttgaagcggttaagtactataaggtggggaggcgtttcatgcatccctgtatgaaaaaagatgaaatgataaaaatatagttgtcttcatcagtaaaggatactagctatttgcataacttttgaaaaggaaatgcttctattcttcttttattctgccaaatagttgacctgaagtgataaaatgtattataatcgtaaaagacatgctgaagaagtgtttctttttgcatgctgaagttagtatgtaagtgtgatgtttcggagggagggaaagagaatgtcaaaaacagtcgttcgtaaaaacgagtctttggaggatgcacttcgccgttttaaaagatcggtttctaaaactggtacacttgctgaagcaagaaagcgcgagttttatgaaaaaccaagtgtaaaacgtaagaagaaatctgaagcggcaagaaagcgtaaattctaagagagggtgtaagttatgagtcttctcggtcgtttaaacgatgatatgaaacaagcgatgaagaataaacaaaaagaaaaattaaccgttattcgtatggttaaggctgctttacaaaatgaaggtattaaactgcaacatactcttactgaagaagaggaaataacagttttagctcgtgaagtaaaacagtataaggactccctccttgaatttaaaaaagctggtcgtgaagaccttgttaataaactgcaaagtgaaattcagattttaagcgcatatttgccagagcaattaactgaagaagaactagttgatgtaatcaagcaagttatttctgaagttggtgcgacttctaaagcagatatgggtaaggtgatgactgctgttatgccgaaagtaaaaggtaaaacagacggatcacttgtgaataagctggttatccagctattagcgtaaaaaaacgtctcatttcgtatgagacgtttttttattgttcttattaaggagaaacgctatattgcttaaaaagggtttctataagtgatagaaacccctctagttaaagtttcaatttattatttccttgtataattccgattctacacctattcttacttccttgactaaaacttctttcgcaaataaaagctaagtaccgaaccttctgaaaatcagattgaagttttatagcttgctcttcagcataatcctcaaaggtaacgaaagagattctaactattttagattttgcatcagttgcataaaatggccggatattactgtcgataatttgttttataacattcgaaatttcttgactaaagccaatttactttcgtatttcctcatttattaattcattttttaatgaaccctaatattttttgaaattcatataacaaccatctataaaatattcttacttacaacgtaacattcagagtggagaaattttctttttttttgattttatccctcattaacgggcagcccgattggtgaggggggattaaagtttcactttatctcatttgtccaataaatgacaactacttattctatggtcagtatgtcacatccagaacgaattgtaacagtttttttcaagtttctaacttctcgctaggctcaatttcttaatgtaacttgtactgatatcctgtaggggcgcatattcttgtattaatacttctattattaaaggtaacatcctctgatccatcattgtcctgacaaatatgatttcatatagcgactgttttaattaacatgatatgaactcttacagaatatagttatgttagtgaagtcgttataacacgataggcacttgtgaagaaatacatatatatgggatgagagggggtctttcgagatgaagaaattagaacaaatgaaaaattggttgacaaaacaagtagacctaccagtggatgtattaatggatctacctcggattactcttgttgggcaaatacatatttatatagaaaatcatcgggggttattagtgttttcagataaagaagtgcgattacttttaaaacacggtcaattattaattaaaggacaatcctttgttattaaaacgattcttccagaagagcttttgctcgaagggataattgagcaagtaacatttttagaaaatgaaaaaaaaggtgattgaagtgaaacttccatttgtgaagtttttcttctttatcctgtaaaagttccgttgatagagactgattacagttttactcggtttcattttagtacgagctattttaatgtttcaaataaaaagtagtatatctacttttagaaaggtagtgaaggtggtaaatgaaaaataaatggtttataaagtggcttggatatgtaaaagtgcgaattgaaggtagaggagcggaacggtttgttaatgaatgtgtacggaggaatttattagtttgggatgttaaaaagatagctgatgaaacgttagttttttgtatgttgttacgcgatgtgaaaaaaataaaaccaatttatagaaaaaatgaatgtaaattatattttattggacgttatggttttcctttttggaataagcgtttaattaaaaatagtggatttttaattggttttttaattttcttttttggtgtgattgcaatgtcaaatatggtttggaaaattgaaattacaggagcaaaacctgaaacggaatatatattgatgaaagaattggataaaatgggtattaaaaaagggaaactacaatttcaaatgccgaatgtagaagatgtacaacgccatttgacagataatattaatgccattacttgggcgggactagaagtaagaggaacgacgtatcattttaaaattgttgaaaaaaacgaaccgaagaaagaaaaggaacaaaggccgcaaaatttagtagcaaaaaaagaagcgattattacaaagacgttcgtagaagttggaaagccggttgtactgaaaaatgatcatgtagaaaaagggcagattctcgtatcaggaatatatggtaatgaggaaagtccgacgattgtttcagcgaaaggtattgtgtatggagaaacgtggtatacatctaaggtggatgtcccgttaaagacgcaattccaagtgtatactggtaatgtatacaatgaacattttcttaaatttggggatacgaaaataaaaatatggggatttcagcatgataagtataaacgctctcgtactgaaagtgtaaaacatgatgtgaaattatttggttttacactgccgattgcatatgaaaaagatgttgtgagagaagaggaagaagcgaatcgagaatatacagaaaagcaagcgctgaaagtagcgaaagagatggccgaaaaagaactaaagaaaaaattggatgaacatgctatgattgtaagtgataagattttgagtaaagaggttgaggcgggtcaactaaaggtcacattgcattatactgtggttgaaaatattgcagagccacaaccaatatccgaatccgatattcaaggagactgagtaatggcagaacaattagtagaaatgaaccaaaaattggaaaatactaacgaagcaatcgctctttttggagtcaatgatgcacatttaaaagtaattgaacgagaactgaatgtatcgatcgtaactagaggagaaactgttcatgtatctggggcagttgaaacggtgacactcgtagaaaaaatcttacagcaattacttgttgtaattcgtaaaagtatatcaatttcagagagagatgttgcgtatgcaattcagcttgcacaacaagggaaaattgctcaatttgaagagttatatgaagaagaaattttcaagactgcaaaaggtaaatccattcgtgtaaaaacaatggggcaaagacgatatattcatgcgatgaagaagaatgatattgtctttgggatagggcctgcaggaactggaaaaacatacttagctgtagtaatggctgtgagggctttaaaacaagggtatgtaaagaaaattattttaacaagacctgctgtagaagctggagaaaatttaggttttttaccaggggatttgaaagagaaggtagatccatacttacgcccattatatgatgccttacatgatattcttggacaagaatatacgcagcgtatgatggagcgaggagtaattgaaatcgcgccgcttgcttatatgagggggcgtacgcttgatgattcatttgttattttagatgaggctcaaaatacaacgggtgctcaaataaaaatgtttttaacaagattaggttttagttctaaaatggttattacaggggatccttcacaagtagacttgccaaaaggggtaaaatcaggactatctatagctgctaatattttatctgatgtatcaggtctgtcatttattacattagaacaaacggacgttgtgagacatccattggtgcaacgtattattgaggcatatgataaaatggaatgatcctatttgtcaggatcatttctttttgtatgataaggttggcgaacgtcatattttttactatcatgaaagataaggaaaataaactataggtactagtgtataaaatgttgcctcaaagtatcgtttggtagaagaaatgaaagctataaatagtttcactttatttctggagaggagaaggtattgaaatcatgtcaagatctcaagaaatttctaagtggtttcgtaatttacaacattcgaaaaaactaagttggatttcttacgttgtattaggagcagtgctgttttttgcgcttatgaataatgtaaaaccagagcaattagatgttaatatgtattctattgcgaaaaagacaatccattctcctataaaaattgaagataaagttacaacggataaaaagaaaaaagaagccgctacaaaagttgaagatcaatatacatataaaagtgagtataaacaaaacaaagttgatattgtgaatgacgtttttgctaaagtggatgaagtggtgcaagagattaaagctgttggaccggatgatcaaaaaaagatgactgatgctgagaaagtggagaagttaaaaaagaaactacccgctgacttaacgaaagaattatctgattcaaacttactaagtttgattaatgcagattcgagccaattagtattagcgaaagatgctgcggtcacagcgattaatagtatcatgactgagcatattaaaatggacgaattgaaagatgcgaaagaacgatatgtaagtgagatgaatagtgttaatgttgataatggtttaaaagagtcaattaaggcgctaggaagatatgcaatttcagcaaactatttttatgacccgatcttaacgaaagagaaaagaaaagcagaggaagatttagttccacctgtttatattcttcaaggacaagttcttgttagagaaggtgaaacaatttcaagtgatgtgtataatcagttgaaattagttggtttgttagaaaaagggaacggctttcaaccttatgttggattagcggtactcattggtgtgttactatactttatgcataaacaatttgaattatttttaaagagaaaaagagaagatagaccgtatgttttagcgtatattacaattttgtctatcacaatcgtcttaatgaaaatcattagtttgtttcaaaaacttgaatacgcggggattgcatatgttgtcccagttgcgatgggaacaatacttgtaaaactaatgattggtgatcgatttgtctttttaacgagtatgattttttctgtatgcggaagtattatgtttaatgaaggagtaacgagtacattaaattatagtgtagggatttacgtattgttaagttcattatcggttagtattttcttgcgagaaaaaaatcgtcgtacaatgattttacaagctggtatactcgtttctgtattaaatgtagtcgtattggcggcgctcttattattacgtaatgggaatttttcgcctcttgaaattggtacgcaattattaatggcttcactttcagggattatatcatccgttttggctatggggattttaccatatttagaaagtggacttggaatcgtatcaagcatgaagcttatggaactatcaagtccaaatcatccgcttttacgcagaattttgttagaagcgccagggacatatcatcatagtgtaatggtagcgaatctttctgaggctgcttgtgaagcagtcggggcaaatggtgtattagcgcgtgtaggggcatattatcatgatgtaggaaaaacagtacaaccgcaattttttattgaaaaccaaatgggaattgaaaacccgcatgataaattagatcctgtaacgagtaaagatattataattgctcacgtaacggatggagtaagaatgctcgaagaatatcatattccacaagaaattattgatatcgctgggcaacatcacggtacaacgttactgaaatatttttattataaagctattaaagaagataaagaaaaatatacagaagagatgttccgttatccaggttcaaaagcaacttcgaaagaatcggcaattgttggtattgctgatagtgtagaagctgcggtacgttctatgaatcacccaacgccagaacaaattaataatttggtgcaaagtattattaaagatcgactacaagacggtcaatttagtgaatgtgatttgacgtttaaggaactacaaatcgttggaaaaacgttgtgtgaaacgttaaatggtattttccattcgcgtattacatatccggaacttccggaagaaaaggagaaagaatgagtttgttaattgattttattgatgaaacagaagaagtaaaagaagcgtatatgagtttaattcgtgaagtgttagaaaaagcagctcaaatggaaaatatcgaggatggtgcggaggtatcggtgacatttgtagataatgagcgcattagagaaattaatcgtgattaccgagataaagatcaacctacagatgtaatatcctttgcgatggaagaaatgggagaaggagaaatggagattgttggtgcagagatgccacgcatgttaggtgatcttattatctctattccaagggcgaaagagcaagctgaagagtacggacattctttcgatcgtgaacttggatttttggcattacatggctttttacatttacttggttatgatcacatgacagaagaagatgaaaaagaaatgttcggaagacaaaaagaaattttagaagcttttggattaggacgatgaaaaaaggaaaacttatagatagttttggatatgctatagctggtatattcttttgttttcgtcatgagcgaaatatgaaaatccattatttagccgcagtcattgttatatgctgcggcttttatttccatattacgagaacagagtggatgatattacttattgtaatagggagtgtaatgagtttagaaatggtaaatacggctgtggaaaaaacagtagatttagcgactgccgatattcatccatttgcaaaaattgcaaaggatgttgcggcaggagcggttttattgtttgcaattatagctgttataattggtgctattatctttttaccgtatatggtatagttgcattccgaagcttttattaagctttggaagtgccgtaaggggctttaatgagagagtgtacctcttcatagctgtgaacaggaaggatgcgggaatatgaatagtaaacaattaattctagaagcaatcgaagcgcgtaaacaagcgtacgtaccatattctaaatttcaagtaggtgcagcactattaacgcgcgatggaaaagtatatcgtggatgtaatgttgagaatgcatcatatggcttatgtaattgtgctgaaagaacagctttatttaaggcggtttctgaaggagataaagaatttgtagccattgcggttgtagcagatacaaagcgcccagtacctccttgtggagcatgtcgacaagttatggtagaattatgtaaacaggatacgaaagtatacttaacaaatttacatggtgacgttcaagagacgacagtcggagaattgttaccaggagcatttttagcggaggatttacatgaatagaaaaggttataaatcaggttttgtctctattattggcagaccgaatgttgggaaatctacatttttaaatcgtattatcggccagaaaattgctattatgagtgataagccacaaacgactcgtaataaaattcaaggtgtatatacagaaaatgatgcacaagttattttcattgatacaccaggaatacataaacctaaacataaactaggcgacttcatggtgaagatggcgcaaacgacattaaaagaagttgatatcgttctgtttatggttaatgctgtcgaaggctttggtcgtggtgaagaattcatcatcgagaagttaaaagaaacgaaacaaccagtatttttagtaattaataaaattgaccaacttcatccagagcaattactagagttaattgatcaatatcgtaaactacatgagtttgcagagattgtaccaatttctgcgttagacggtaataatgtggacgctttaattggaacaattaaaaagtatttaccagaaggaccacaatactatccagataatcaagtaacggatcatccggagagatttattattgcagagcttattcgtgagaaagtactacatttaacacgtgaagaagtgccgcattctgtggctgttgttatcgatgcgattcaaaagcgtgagggcggggcagtttatataaatgcaacgattgttgttgaacgtgcatcacaaaaaggaatcatcatcggaaaacaagggaaaatgttaaaagaagttggtaagcgagctcgttttgatattgaagcgctacttggttctaaagtatttttagaagtatgggtaaaagtgcaaaaagattggcgtaataaaatgtctcagcttcgtgacctaggtttccgcgaggatgagtactaaaatagagtcaagctgtaatcagtggatggttggttcatccactgattattggtttttatgaactttgataaattaggaaaaatttttctcacatgaaaatggacaaaatgggtcaatttaataacaacaaaggaaattggtttataggctacgcttattgagaaaggtggattcttatgctagattttacctggaagtttttctccaaaacaggaagcattgaaacgtacttgcttttgaaagaaatggaaaaagacgtaaacgatgagatggatcaacatgaagaggagctagcgcatctagactctccaatttcttgacccgttttgttcaaaccttggatggtgacgaacatgtttcaaaaagttgagggcatcgttatccgtacgacagattacggagaaacgaacaagattgttacaatattctcaagagaacttggtaaggtaagtgcaatggcaagaggggcaaaaaaaccgaaaagccgattagcatctgtgtcgcaattaatgacacatggccagtttcttattcaaatgggatctgggcttggaacattgcaacaaggcgagattatttcaactatgaaagaaattcgcgaggatatatttttaactgcttatgcatcatttattgttgaattaactgataaagcaacagaagataaaaaacataatccgtatttatttgaaatgttatatcaaacgttgcattatatgtgtgagggtgttgatccagaagtattatcattaatttatcaaacgaaaatgcttccggtattagggatgcgcccgtactttgatacatgtgcgatttgtcatcaagaaacagactttgtcgccttctccgttagggaaggcggttttctgtgctcacgtcatgcggagcaagacccgtatcgtataccggtaggagaagctgttcataaattattacgtcttttcttccatttcgatttacataggctcggaaatgtatcggtaaaggatagcacaaaaaaacaaatgcgtttagtattgaatacatattatgatgaatattgcggaatttatttgaaatcaagacgttttttagaacaacttgataagtttcaaatataattttgggccgtatacggtcctttttacatactttctttttcgaatagcatatttagtatataatatttaagagatagtataacttttttcgttgtgcattaaaggtggtgattatcatagagctgaataaacggcaagaacatatcattcagattgtaaaagatcacggtcctattacaggggaatcaattgcagcgcaattgggtctaacacgtgcgacgctaagaccagacttagcaattttaacgatggctggttatttagaagcacgtccacgcgtaggttatttttatacgggtaaaactggggggcagctattatctgaagctgttaagaaaattaaagtacaagattatcaatctagaccggttgtaattgataaaaatgtttccgtatacgatgcaatttgtacgatgtttttagaggacgttggtacattgttcgttgtagatcagatgactctattagttggtgttgtgtctcgtaaagatttattaagagcgagcttaggaaagcaggatttaacctctcttccggttaatattatcatgacaaggatgccaaacattgcgatgtgtcgtagagaggattctttatatgatattgcgatggaattaatagaaagacagattgatgcaatgccagttgtaaaagatacgaaacaaggtttagaagtgattgggcgaattacaaaaacaaatattacacgtgcgtttgtaaatttagtaaataacgaataagtgtaatttgtttaaagtgaggtaatgtaatggataataaaatcgtatatgtcgtatctgactctgtaggagaaacggctgatttggttgttcgagcagcaatggggcaattcccgtttgctcctgatattagacgtgtaccgtatgtagaagatacagggacattaaaagaagtgatttcgattgctaagagtaatcaagcacttatatgttttacgttagttaagcctgatatgcgcaaatatttagtaacagaggctgcaaaagaaggggtagaggcatacgatattatcggccctcttattgatcaaattgaagaaattacggggcaagtgccgagatatgaaccaggcgttgtccgtaggttagatgaagaatactttaaaaagattgaagcgattgagtttgctgtgaagtatgatgacggcagagatgcacgaggtattttaaaagcggatatcgtgttgattggtgtttcgcgtacatcaaaaacaccactttcccaatatttagctcataataaacgcttgaaagttgcgaatgtaccactcgtgccagaagttgacccacctgaagaactatatcaagtggcaaaagaaaaatgtttcggtttgaaaattacgccagataagttaaatcatattcgaaaagaacgattaaaatcacttggattaagtgatggagcaacatatgcaaatattaatcgtattcaagaagaaattgatcactttgaggaagtaattagtaaaataaattgtcaagtaatcgatgtatcgaataaagcaattgaagaaacagcaaatattattgtgaatgcagtgcaaaaccaaaaaatgttttagcacatttaccaaaggtgaatgtgcttttttcgctcgtgtgaaatatggtacctatggattttgtaatagattgtagtgtaatggttatacttatactcctttgtcttttagtatattcaaggtgtgagtttgtcatcctgaaatgtaagatgaaaaaataaagggatatgtagcgtagttgaagaaaatatattataataaaaaattgtgataaaaacctatattttacgtttagactttaatttttcagaataaactagggataggatttacgaaaaagacatgtaattacgttaaatcgacaaaatctatacaagaaaacgcacattatggaaggattcacagaagggatgtagaatacagaaatatgcaaagcatcaacaacatattagttggtgtagatgtatatcccgtgaaggctgaaattgtgcaagttggagcggaatttcatgtcggaattttgtttgtcgcatcatatgctcatcctttaaggaaatagcaaggcaattggatctttgtagatactgaacaaaatggagttgatcgttatatggatcaacatgaaaaagttacaaatctcaagatcaaacagtatatgtggcttgctactcttcttataaaaaggtgtgtatgtattgtttctaagagatacatttgtaacagatgagcaaatgtatacaattttatatagcaagtatgtatatgcgatttatgcagataaaggacctataggaaaggttcaaaatcgtttatacaatgtaatcggcaacactttctaacaagtttagaaaaatattgtcgaattataaaggaattttttaatttatatcgaatacaaaatacgacacggagatggagttatggggaacagaattcccgaagaagttgttgaacagattcggacatcatccgatattgtagaagtcattggtgaatacgttcaacttagaaaacaggggcgtaactatttcggcctttgtccatttcatggtgagaattctccttcattctctgtttcatctgataagcaaatttttcattgcttcggatgtggagaaggtggaaatgtattttcctttctaatgaaaatggaaggactggcttttaccgaggctgttcaaaagctaggcgaaagaaatggaattgcggttgcagagtatacatcagggcaaggacaacaagaagacatatctgatgacactgtcatcatgcaacaagctcatgaattattgaaaaagtattatcatcatttattagtaaatacggaagagggaaatgaagcactttcatatttattaaaccgtggtattacgaaagagatgattgagaagtttgaaattggttatgcatcacctgcttgggatgcagcgacgaaaattttacaaaaaagaggtttatcgctgtctagtatggaacaagctggccttctaataagaagtgagaaggatggtagtcattatgatcgcttccgtggaagagttatgttcccgatctatacgttacaaggtaaggtgatagcgtttagtggaagggcgttaggagatgacactccgaaatatttaaatagccctgaaacaccgatttttcacaaaagtaaattgttgtataacttccaccaagcaagaccgtttattagaaagcgtgggcaagtggttcttttcgaaggatatgccgatgtactagctgcggtaaaaagtggtgtggaagaagctgttgcgacaatgggaacagctttaactgaagaacaagcaaaacttctgcgacgtaacgttgaaactgttgttctttgctatgatggtgataaagcagggcgagaagcgacgatgaaagcagggcaattattgctaaaagttggttgccaagtgaaagtcacatccttgccagataagcttgatcctgatgaatatgtgcaacaatatgggactactgcttttgaaaatcttgtgaaatcaagtgtgagttttgttggttttaaaataaattatttgcgtttagggaaaaatttgcaagatgagtctggcaaagaagaatatgtgaagagtgttttaaaagagttatcgttgttacaagatgcgatgcaggcagagtcatatttgaagtcattatcgcaagaattttcgtattcaatggaaacacttttgaaccaattgcaccaatatcgcaaagaacaaaaggtacagcaaaaacaaataaagcaggttgctaaaacgtctcaagtcgttcaaacaaaaccgaagttaacaggttttgaaagagcggaaagagaaattatttaccatatgttgcaaagtgcagaagtagctgttcgtatggaatcccatatagaagattttcatacagaagaacataaagggattttatatgaactatacgcatattatgaaaagggaaatgaaccttcagttggaacatttttaagttggctctctgatgaaaagttgaaaaatattatcactgatatttcgacggatgaatttattaatccagaatacacagaagaagtgttgcaaggccatttggagacgcttagacggcatcaggaaaaacttgaaaagatggaaattatctttaaagtgaaacaaatggaaaaaacagatcctgtagaggctgctaaatattatgtagcatatttacaaaatcaaaaagcgagaaaatagcttttttgataaagttttagtataatgaatgtttgtatctcgcgtaaggaggggaacagatggctgacaaaccagctcgttctaaacaaattgaaactgaaatgacccttgagcaagtgaaagaacaactcactgagctcggaaaaaaacgtggcgttcttacatatgaagagattgcagaacgcatgaatggatttgaaattgaatccgatcaaatggatgaatactatgaatatttaggtgaacaaggcattgatttagttggtgataatgacaacgaagaaggccctaataatcgccaaattacaaaaacagaagaagagtttgacctcaatgatttaagtgtaccacctggggttaaaatcaacgatcctgttcgtatgtatttaaaagaaattggtcgtgtagacttactatctgcagaagaagaaattcgacttgcaacgcgtattgaagaaggcgatgaagaagcgaaacgtcgtcttgcagaagcaaacttacgtcttgtagtaagtattgcaaagcgctatgtaggccgtggtatgcttttcttagacttaattcaagaaggtaatatgggtctaattaaagctgttgaaaagttcgattatcgtaaaggtttcaaatttagtacgtatgcaacttggtggattcgccaagctattacacgtgccattgcagaccaagcgcgaacaattcgtattccagttcatatggttgaaacaattaataagttaattcgtgtacaacgtcaattattacaagatttaggtcgcgaaccatctcctgaagagattggtgaggaaatggatcttgctccagaaaaagtacgtgaaatcttaaaaattgcacaggagccagtttctcttgaaacaccaattggtgaagaagatgactcccatttaggtgactttattgaagaccaagaagcaacatcgcctgcggaccatgcagcctatgaattgctaaaagaacaattagaagatgtgttagatacactaacagatcgtgaagaaaatgttctacgtcttcgtttcggtttagatgatggacgaactcgtacgcttgaagaagttgggaaagtattcggcgtaacgagagagcgtattcgtcaaattgaagcaaaagcacttcgcaaattaagacatccaagccgtagtaagcgtcttaaggatttcttagaataggttattttttaagtttacttcacttttgtgaagtaaacttttttattttgttaatttttgttaaaatttagctatgggcaacgattacaatttcttgtaatttattttacagaattgtcttttgatttgcaaatgctcatttttcgatttttcgattaattttgtttattatatacaaaaatatatgtagaaaagcgaaaaatatgatgagaaacgttaataattatcgaaataataagcgatatgacaataaaaaacaataaactgaatttatggaatatttttaacaagtggtagtttgctcttttctgatagagcgttttcaagtacaatataaatgactgaatcatctaactatttaggggtatagaggggggagaagagatatgaaacgtaatccgctgattccgttcgctcttattgcagcattgggtattatcgttatgtttgtattttcatttcaggggctaaataaatctaaagagttagctgatgcaaaaaatggcgggaagccagcacaaacggcatcaaaaccagaagatattgtgaagcaaagctgtacgagctgccatggtgatcagttacaaggggcagttggacctaacttacaaaaaattggtgggaaactttcaaaggatgaaattaaagaaattctttcgaaaggaaaaggcaatatgcctgccaatatagttccagctgatcaagccgctaaagtagctgattggttatcgaagaaaaaataaagttccgtatgacaagccttttgcttatgcaaagggcttgtttttctatattttctaaaatacgatgaatgatagagcggtgaattgttgttatgggcttgcaacaactactgtaaattcattatcatggagacagactgacaagagaaggagtaatggaaatacatgaatgaagtaaagctttcaaaacgattagaagaagttgtacgtgaaataccagtaggatctacagttgctgatattggatcggatcatgcgtatttaccgtgttatacaattataaataatattgctacaaaagcagttgcaggagaggttgtagatggaccatttcgctctgcgcaagcaactgtagctgaaagtggtttacaagataaagtagatgtgcgtaaagggaatggattagctgttatcgcaccaggagaagtagatgtaattacggttgccggaatgggcggagcgttaattcgtgacattttagaaagtggtaaagaaaaattagaaggtgtaacacgtttaattttacagccgaatattgcagcgcatcatattcgtgaatggtttattgagaatggttgggagcttatccatgaaaaaatcgtaaaagaagatgggaaaatttacgaaattttagtaggggagcgcggaaatgttgtagcgccttactctgaaaataaacaagctgaattgtttatgggaccatttttaataacagaaaaaagtgaagccttcgttgaaaaatgggaaggagaattaaaaaacttccaaaatattttaaaacagttagaacgtgcggctgattctgaagaaacaaaagcgaagcgtggggaagtagaagcgaaaatgaaaatgataggggaggttttatcatgagtaaaattccaaacggccatgaaattatttctttatttgaaagtatgtatccgaagcatttggcaatggaaggagataagattggtctgcagattggagcgcttaataaacccgtgcagcacgtattgattgcgctagatgtaacggaagaagttgtggatgaagcaattcaattaggggcaaatgtcattattgctcatcatcctttaatttttaacccgttaaaagcgattcatacagataaggtgtatgggaaaattattgaaaagtgtattaaaaatgatattgcaatctatgcagcgcatacaaatgtggatgttgctaagggcggggtaaacgatttacttgctgaggcgttaggattgcaaaatacagaagttttggcaccgacatatgcagaagaaatgaaaaaagttgttgtgtttgtgccagtcactcatgcagaagaagtaaggaaagcattaggagacgcaggtgctggtcatatcggcaattatagccactgtacgtttagtagcgagggtacaggcacatttgtacctcaagaggggacaaatccttatatcggggaaactggacagttagaacgtgtagaagaagtgcgaatcgaaacgattattccagcttccttacagcggaaagtgattaaagcaatggtaacggcgcacccttatgaagaagtagcgtacgatgtgtatccgcttgataataaaggtgaaacgttaggcctaggaaaaataggatacttacaagaagaaatgacgcttggccaatttgcagaacatgtgaaacaatcattagacgtgaagggcgcaagagttgtcggtaagttagatgataaagtgcgtaaagtagctgtacttggtggagatggtgataaatatataaaccaagcgaaatttaaaggagcagatgtatatgtaactggtgacatgtactatcatgttgctcatgatgcgatgatgctcggtttaaatatagttgacccaggacataatgttgaaaaagtaatgaaacaaggtgtacaaaagcaattacaagaaaaagtggatgcaaagaaactcaatgtacacattcatgcttcgcagttacatacagatccatttatatttgtataagaaaaataaaaaccgttgctcatgtaagcaacggtttttattattgttcttttttcactttcacgcgaggtaatattttttgtaacggtacttttcgaactctttcccatgtagcgggattcattgggtcatattgctctaagaaagcgataacttctttcgtaattggcgttggagtagaagcacctgctgtaacagctacgttttctacaccttgtagccactctaattgaatttcgcttacatcagcaactcgatatgcttttgtacccgcgatttcttgtgatacttgtgctaagcgatttgaattgttacttttcggatcaccaacaacaattgttaagtctgcaacatcagcttgtttagcgacagcttcttggcgaacttgagtagctaaacaaatttctttatggaattctgctgttgggaattttttttgaatgtcctccattaaatgttgaacatcccattgactcatcgttgtttgatttgttactaaaattttatctgttgggatttctaatgtttttaaatcatcggctctttcgataaggtgaacgatgtcaggtgcaataccaactgcgccttctggctctggatgattttttttaccgatataaatgacatgatacccttccgctttcttagcttcgataaggtcatgcgtcttggtaacatctgggcaagtggcatcgattgttgttaaacctttttcttttgcgcgttgtttaacttctggagaaacaccgtgtgctgtgaaaataacagtaccagaatcaattttatctaaaatttctaagcgacttggaccgtctaatgtgatgattccatcttcttcaaaagcgtctgtaacatgtttattgtgaacaatcatacctaaaatataaatgggtctcggcaatgatttatctaatgcagcgttacgtgcaattaccattgcatcgacaacaccgtagcaataaccacgaggggaaattttaacaattttcatatgagtaatcctctccttctaaacaagggatacttttgtgcatagtcttttacattataaaggaggagtggatagaaaacaaaggattgttacacatatagttttggttttgttgctgtttgttgaactggttctttcggtaactctttttctattacaggttcaatcactattttctttcgttttcgtttctttttttgaggtgcaggaggcggactttctacctcaactggctctgttacattttccgtttgattttcttccgtactttttccagaggtgaggattttaacaatgcttggtagactacgcataataggaccatactgttcgacgacaggacctacagattgaacgacttgggatactttttcgatgttgtttatcatattagtaggattcgaaattaagttcgaaaagaaactgccgatgccactgcttgctgttgcggcagctgtagttgcgccgccgcgcgtttcatttgattcatacatttgaggcggtatcatttgctcaggatgttgctgcatgtatggttgatattgtggatgttgctgctgatattgttggtggtattgctgctgatattgctgttgatattgtggcggtggtggttgctgatgcatcatcggttgcccttccatttgtcggtaaggtggaaccatttgcataaaaggctcggttggatcgtgttttttaaaaagcttagcaagaaaacctttctttttttgtgccattggtggtagttgtggaattggatatggtgtataaggttgttgccctggattcggatacatttgccttgtaggggatttcggaaacatgtgagaaatcctcctttcttcagttaggtatatacacatacaatatgcaataaaagggaagaaggttagtttttgaagtgaaaacctaaactaaagatggattttacttgtagatttcgatataatgtagacttgactgatttgtgcgcgcagtagaaattttagaaagaaggtgtaacttatgacacaacaaacttttacacagtatgattttaaaccatttttaatagatgcagttcgtgaactacgctttacagagccgacaggaattcagcagaaaattttcccggtcgtgaaaaaaggtgtaagtgtaattggacaatcccaaacaggttctgggaaaacacatgcatacttacttcctacattaaacagaattaatgcaagtcgtgaagaagtacaacttgttattacagcgcctactcgtgagttagcacaacaaatttacgaagaaatcgtgaaattaacaaagttttgtgcggaagaccaaatgattacagcacgttgtttaattggtggaactgataaacaacgctcaattgaaaagttgaaaaaacaacctcatatcgtagttggaacaccaggacgtattaaagatttagtagaagagcaagcattatttgttcataaagcaaatacgattattgtcgatgaagcagacttaatgcttgatatgggattcattcatgatgtagataaaattgcagcacgcatgcctaaaaacttgcaaatgttagttttctctgcaacaattcctcaaaaactaaaaccgtttctgaagaagtatatggagaatccagagcatattcatatcaatccaaaacaagttgcagctggaaacattgaacactatttagtgccttctaaacatcgtaataaaattgatttagtgcataaaatgctacttcaatttaaaccgtatttagcagttgttttcacgaatacgaaaaagatggcagaccaagttgctgatggattaatggaacgtggcttaaaagttggacgaattcacggggatttatcaccacgtgatcgtaaaaaaatgatgaaacaaattcgtgaccttgaattccaatatattgttgcgactgatttagcagcacgtggtattgatattgaagggattagccatgttattaactatgagctaccatcagatttagatttcttcgttcaccgcgttggaagaacagcacgtgcggggcattctggtattgcagtgacgatatatgatccagcaaacgaagaagcgttagatagtttagaaaaacaacgtcatattgagttcaagcatgtagatttacgcggagatgagtgggccgatttaggtgagcgtcgtcgtcgtaagagccgtaaaaaaccaaatgacgaacttgatgttatggcaacgaaagttattaaaaaaccgaaaaaagtaaaaccaaactataaacgtaaacttgcaacagaacgtgacaaagtgaagaaaaaatatggcaataaaaaaagataaggggtttcccttatcttttttttatcccgctatttgtgggagatgtaatcaatatggatagaaaagtattgattaaagtttcacttaatccagctaatttaaatgaaaagtatagtctgtataaatagtcatataaatttgtgtagtgcatcttttgtgaacaaacaattcactacatatttctacaaattatgctatcattatatctattgtatattgaagaggtgattgtatgttaaagattggatctcatgtttccatgagtggtaagaaaatgttattagcagcaagtgaagaggctgtttcatacggtgcaacaacgtttatgatttatacaggtgcaccgcaaaatacacgaagaaaaccaattgaagaattgaacatagaagcaggaagaaaacatatggagctgaacggaattgaggaaattatcgtccatgcgccgtatattattaatgttgggaatacgacgaagccagaaacattccaattaggcgtagactttcttcgcatggaaattgaaagaacatcggcattaggtgtagcgaaacaaattgttcttcacccaggagcgcacgttggtgctggagcagatgctggtattcaacaaattattaaagggcttaatgaagtattaacgccagaacagacggttaacattgcgttagagacgatggcaggaaaaggaacagaatgcggtcgtagctttgaagaaattgcaaaaattattgatggtgtaaaatataatgaaaagctatctgtatgctttgatacgtgtcatacgcacgatgcaggatatgatattgtaaatgactttgacggcgtattaaacgaatttgataagatcgttggtatagatcgtttacaagtacttcatattaatgatagtaaaaatgtacgcggagcaggaaaagaccgtcatgaaaacattggatttggtcacattgggtataaagcattgcatcacattgtacatcatccacagttaatgcatgtaccaaaaattcttgaaacaccgtatgtaggggaagataaaaaagataagaagccaccatacaaattggaaatcgaaatgctgaaaaacggcacttttgatgaagggcttcttgaaaaaattaaagcgcaataaggagggggaaatcccctccttattttagtagttgctgaaataatgtatttacttgttgggcagtggcaggggaagttacttttgcgatttgttttaagagctctagtcgctcgttgttatcgtaaatattaatatttttacccttcataagtaaaacgatttgatcagcttgtgcggctgtaatgggaacttcatattctttgctatattttaataactcttttgtagaaatatgatttaattttttattaacaatttgtttaatgaggttcatcttattatcctccttcacgcgttcttctatcgaaatatatgagcatatagcttgtacatattcgtatggagtttcttttttcatgaggaaaagaagcgtatgttataatataaggacaaaactacagaaaaagagtaaagggaggacttatggagcaaaagcaacatcgaaaagaaagtgttattcatctcatttatcgtttagttatgattatttttggagcagcatgcgcggcggtagcaattgaactatttttaatgccaaataaaattattgatggtggaattattggtatttctcttatattagattatcttactcctaacatttggtggttaagtttttctactttagtcgttgttctcaatatcccatttatgtattccggttataagcaaattggaaaaacatttatgttatcttcgacatttggtattgtagcattagctttcattgagtcaacgttacatgcggtaccaccatttacaacagaacctattttagcgacagtgtttggtggtcttattttaggtcttggtgtaggacttgtaattcgtcatggtggatcgctagatggaactgaaattatggggattttattaacgaagaaattaccgttctctgttggtgaattcgtaatgtttgtgaacttatttatttttgcatgggcagcatttgtgtttggtgtggaacaagcgatgtattctgttatgacgtactatatcgcatttaaaacgatcgatacagtaattcaagggctagatgaaacgaaggcggttttaattgtatctgatcaatatgaggaagtatcaaacgcgattttgcatcgtcttggccgtggaactacaaagcttgtagcgaaaggtggttacacggataaagaaaaagaagttatttatgcagttgtaacgcgtctagaagtgacgaagttaaaatcaattgtgcatgaaattgatgaaaatgcgtttgttacgattatgagcacgcaagagacaaatggtggtaagtttaaatcggctattcactaaaaagtttataggaatatttttcgaaagcagagaatttttctctgctttttgttataatagtaaggtttcttgaaaaaatagatatattttaggcagattggtttacaactataataagctgtactataattcaaatagatataaatcggaatcattctgaattaaaataggtgagatgctatgaataatatattagaaattgaaggtttaacattccgatacgaagatcggaatgtgttagaaaatattaatttgcaagttccgaagggagcttttttaggtttagtgggaccgaatggttcaggtaaatcaactttacttaagtgtttattaggtgttttaaagccaaaagaaggaagcattcgcgtgtttggcgttgatagtaagaagtttaaggaatggaacaaagttggttatgtatcccaaaaggcaaatagtttcaattctggttttccagcaactgtttctgaagttgtgtcaatgggacttgtttcgaaaaaagggctttttcgctttttcacaaaagaggataagaaaaaggtagaaaaagcaattgctgatgtagggatgagtgagtttcaaggtcgtaacattggagagctttctggtggacagcaacagcgtgtatttattgctcgtgcgctcgttagtgatcctgaattgcttattttggacgagcctactgttggaatcgatgtgaaaaatgtggaaagtttttacgaaatattagaggatttaaacaaaaggctcgggatcacattaattcttgttactcatgatatgggagctgttactgaaaaagtaacacatgttgcatgcctaaaccaacatctacatttccatgggaatgtagagaagttccgagagttagaagatgcagaaatgtccgtcttatatggacatcatgttcatcgtttagaacacgaacatgagcatcacgggaggatataatgatacaagattttttacaatatgactttttacgtaattctttatacgcaggtattttaattggacttgttgcaccgttaattggtgtgtttgttgttattcgtcgtttatctcttattgcggatgcattaagtcacgtgacgttatcgggtattgcagcaagtttattacttgaaaaaaccatttttacaggtgggtttttaaaccccttatatatggggatgattttctcgattggtggagcgctactaatcgaaaagttacgaactgtatataagcactatcaagaattagcaattccaattatcctttcggcagggatgggggttggagttattttcatttcacttgcaaatggatttaacacagacttatttagttatttatttggtagtgtcagtgctgtaacaagtacagatttaattattattgggattgtagcaattgttgttgttgcgacaattattttattatataaagagctgtttctattatcatttgatgaggaatacgcagtatcaactggtttaagagcgaaatggattcactttattttcattatattagttgctcttgtcattgcagtatcaatgcgtgtagtgggggttcttcttgtatcatcattaatgacgttaccagttgcagcaagtattcgtattgctaaaggatttaaacaaacaattttcttttccattttatttggtgaaattgcagtaattggtggaatgtttgcttcgtatcaacttgatctagcgccaggtggtacaattgttatgatagcagttcttattttaatcggtgcgattttatggaagaagaaaaaaactgcataaagtagggataggtatgaatctaacagaagctttacgcctaatgaaagaaaaaggatacaaacatactggaaaaagagaagagatgctcagattatttgcagcacataatcgttatttaactgcgaaagacgttttagagcatatgaaggacgattatccagggcttagttttgatacgatttatcgtaacttaacagtttttgctgagattggtgttttagaacaaacggaattaaatggtgaaaaacattttcgttttacttgttctattatggaacatcatcatcattttatttgtttggattgtgggggaacgaaagagattacttcctgtccaatggattttatgaataaagattttaccggttatgaagtaacggggcataagtttgaaatatatggtcgttgtccaaaatgtgcaaagtaaaagctcgtcggttatataactgacgagcttttttacgtagaaaagaaggttgctcacaaatgttgtggcaaccttctttttattgttcttgtgtctctttttctttttctcgttcagcagccatttcagcagcaattacgtcgatttcttttttcagttcttctaccattgtttcttctggtactttacgaacgacttgccctttacggaataataatccctctccacgtgcaccggcaataccgatatcagcttcacgagcttcaccagggccatttacagcgcaaccaagtactgcaactttaattggtacttgaagtgtagagatgtattcttccacttcgttagcgatgctaattaaatcaatttcaatacgaccacaagttggacaagagataagtgttgctgcgttagacgcaagaccgaatgattttaatagttcacgagcaacttttacttcttcaactggatcagcacttaatgaaatacgtagtgtatttccgatgcctttatttaagattgctccaagaccagcagcactttttacagttccggcaaacaatgttccagattctgtaatacctaaatgtaatggataatcaaaagcacgagcagctttctcgtatgcttcaattgctaagttaacatcagaggctttcatagatacgataatatcgtggaaatctaggtcctctaaaattttaatatgatgtagcgcgctctcaaccataccatctgcagttgggtacccgtacttttctaaaatatgacgctctaatgaaccagcgtttacaccaatacggattggaataccgcgctcttttgctgcatttacaacagcttctactttatggcgacgaccaatgttacctggattgatacgtactttatcaatgccgccttcaattgcttttaaagcaaggcgataatcaaaatgaatatcagcaacaagtggaatgttgatttgtttttttatatcagcaatagcatctgctgcgcgttcatctggaacggcaacgcggacgacttgacagccggcttcttctaaacgcttaatttcagcaactgttgcttcaacatcatgtgtttttgttgttgtcatactttgtataattaattcattattaccgccgattgttaaattaccgactttaactggacgtgtttttgtacgatgagtcatttcattcacgaatagatcgctctccttataaaagaagtttcttatttagtccctcatatcaatgatagtatacgtgatatagggctatagaaaccgaagtactcggtttcacttttactattgtatcagcgcctttatgtaattgacaaggattaagtgatagcttattgatataaggggaatttataagactttccaatttgtatttttgtagcagatgtacttttgtttaattgtttaaagtcgtcaatgactttttctatggaaggaatttttttcttgttaatttgttctgtaatagaaagaactgtctcaccagtttttacttcaattgttttataagatacatccgtttctttttctgttttgttctctttattctgctgactgtctgtgttttcttttttaatcgtttgagcagcagttgtttttttatatgaacttaacatcggtaaagtaccgatttttatatcgtaataaaatatataaccgagaacaagcacgaataggaatatacctaatctcttcatattcttcactcctttgctaggaatatatgcttgtccaaaaaaaaaatgcctatttaggcattttttttcgttcttatttttctttcggttttggaacttctttaatcgttaagtacagaacaattaaaacaactgcgatatagatgaatgttgatccaggtacgacaatcttacatgcatccataatcataaagaagattgttgggattgtgtagctgtatgcagttagtgtccaaacttgtttataggatagtttacgttgaccgctcatagcagaaccgatgaacgcaagtaaagtcacacctacaaaagtgatgaataattggaataggtacactaagaatccaataacaaataataaaattggataaatattatcgaataaagaaataaattcttgtagatcttttttctcaagagatgcacctaacaaatcgttataagaatacgtttgtatttgaccatttcccatagagactactttatcttttaaaacaaataaacctgttttattttgatatttttctaggtctgttgaatttggatcaaatacgaaaagtgcatttccttcttctttttcaataggttgatcaatatcggcttttagttcgccattttcaattttaaaatcaggtaaatctttatcgatgacttgatttaccatgcttacaccatcttggataaaactaccgtacaaaaaagttcttggaatagtagtaattaagcaaagtagcataatatacaaaatggttttaccgattttttgaaaacggaatagcgccatatctttaggcgagtatatgctttttacgaattgggtaaatatggacatagattcacttcctttatgtatgtataaaatcattgtaacgtagtaatctagagaatctcaagatatattatatttacatatagtggagataactaaatttcttttattaactttcttcttttaaataagaaaaatacaattgacacttttcttttctatatggtaaatttatcttacatttcttaaagagcatatccgataggaattcctttatttgatatgttgttacatacataattgtggacccttagctcagctggttagagcagacggctcataaccgtccggtcgtaggttcgagtcctacagggtccatatccatttcacatgtttattatgttagcaggaagcttccttgtagaaggaagctttttttacggaatatatgagcattttaattgaaaagaagtggggattttgctactttaatgatagcaagacaatgtgatttatttgtttgcaccctatggcaattagggtagaatgaagttgtatgtcacttaagtggcaatacataaactgggaggaatataacaatggcaaaacacgaattaccaaatttaccttatgcgtatgatgctttagagcctcactttgacaaagaaacaatgaacatccatcatacaaaacatcacaacacgtacattacaaacttaaacgctgctttagaaggtcatgcagaattagctgacaaaagcgtagaagaattagttgcaaacttaaacgaagtaccagaagcaatccgtacagcagtacgtaacaatggtggcggacatgctaaccatacattcttctggacaatcctatctccaaacggcggaggacaacctgtaggtgaacttgcaactgcaattgaagcaaaattcggtagcttcgatgcattcaaagaagaattcgcaaaagctggcgcaactcgcttcggttctggttgggcttggttagtagtaaacaatggtgagttagaagtaacaagcactccaaaccaagattctcctttaactgaaggtaaaacgccagttatcggtttagatgtttgggagcatgcttactacttaaactaccaaaaccgtcgtccagactacatcggtgcattctggaacgttgtagattggaacgctgctgaaaaacgttaccaagaagcaaaataattgtaacaaatatagaaaaagctaggggagagcccctagcttttttctatgctttccttttacataattgggcttgtctttggaagactagaacatgaagtaaaggagagttgtgtatgaaatggaaacatataattggtgacgttgaagtgaatcgggatttagtgttattgctccttataggaggtttatacacgctcgcaatttctttatcgaatacgtttgtaaatatttatttatggaaacaaacacaaaattatgtgaatcttggcttgtataatttagccagcgtggtattacagcctctcacatttcttgtaggggggaaattagcgaaacgtatcgatcgctcgattttattacgaataggggtaggaacgctcgcaattttttttatcgttgtcttagtagcagggaaaagtgcttctcagtatattctattaatgggggctcttttaggagtaggatacggtttttactggttggcttttaacttattgacatttgaaattacagaaccagaaacaagagatttctttaatgggtttcttggacttcttacatccttctctgggatgattggaccaatagcagcaggatacacaatttcacgtatggagaaatggagtggctatactgttatattctttctttcattagttctatttgcaattgctgtcgtcttaagcttctttttatctaaaagagaatgtgaagggcgttatgaaatcgtgcaagtattgaaagaacgacggattgataaaaattggggaaagattacacgagctcattttttccaaggattgagagaagggacgtttatttttgtcatttcagtatatgtttatttagcaactaatagtgagttcgcattagggaaatacagtttagtgaactctgctgtatcctttgtatgttattacttagttgctcgtatgttaaagaaggagtggcgaaaaaaagcaattttacttgggggcattattttatatgctgtcgtctttttagttattttcaatgttacatacacgaaattacttatttatgcggcatgtattgcgattgcatatcctattttacttgttccgtacggatcaatgacatatgatgtaattggtagagcgaaaaatgcgagagaatggcgtgtggaatatgtcgttgttcgggagttatggttaaacgccggaagaatctgttccattttaagttttttatgtgctgtactattctttccacctgaaaaaagtttaccttacttattatgtattttaggtgctggacattttcttatttattttgcagttaaaaatgtcaaatatgatgagggaaatgcgagtaaaacaagtgttgtaacgcaagagaacgcgcaaaaccaaactgaaccagaaggttaacttctcgtttgttttatgctagaatagaaaaagatgtaagacagcagtgaggacacctgtatgagggtgtccctttcacattacatagctgttggtagagggggtttgtatgagcaagaagcagaagcaaaataagaaaaagacccacgttccttttcgattaaacgtgttgtttttctgcgtgtttttaatgttctccgcggttattgtaaggctcggatatgtacaaattgttcgcggtgaagaatataagaatgaagtggagaagaaagaaaactcaacgataagtaatcctgtaccgcgtgggaaaatatttgaccgttatgggcgacctgtagtagataatgcagccattcgtactattacatttacaaaaatgaagggatcaactgcagaggatcgcttagaaacagcgaaaaagctagcagatttgattgaagtaccgacagataaattaacagatcgcgataaaaaagattattggcttgctatgcataaagaggaagctaaagaaaaaattacgaataaagatcgtcaagagtttaaagataaaaaaattgatgataaagaattagacgagcgtcagagaagtcgtgtaacagaagaagagattaatcaattatccgccaaagatctagaaatactagcgattaagagtaagatggacggcggatatgcaatgacacctcaagttattaaaaaggatgctacagaaaaggaatattcgattattagtgaaaacctagcagcattaccaggtgtagatacgaatgttgattgggagcgaaaatatacgtacgatgatttattccgaagtgtacttggtggggtgtcgacatctgatgaaggcttaccgagagaaagactagattactatcttgttcgtgattacaatcgaaatgaccgagtaggaaaaagttatcttgaacaacagtatgaagatagcctgcatggtacgaaagcagaagttagaaatgttacagataaaaacggtaatattttagaaacgattaatgtatcaaaaggacaaagtggtaatgacctgaacttaacaattgatatggaattacaaaagcgcgtggaagatattcttgcgaagaatttaatgaggtttaaaggaagtgaacctcttttagatcgcgcatttgttgtaatgatgaacccaaaaaatggtgaagttttatctatggcggggaaacaattagttaacgaagatggtcaaacgaaagtaaatgactttgcattaggtaccatgacaagttcttatccgatggggtcaactgtaaaaggtgcaacagtacttactggatatcaaactggtgcgattcaaccaggggcagtacaattggatgaaccaattaaattaaaaggtacacctacgaagtcgtcttggaaaacgatgggatacattaatgaccttacagctttaaaaatgtcttctaacgtttatatgtttaaaacagcgatgaatatcgccggtgttccatatgtgagaggtggtacgttagatatacctcaaaaagcatttgatacgatgcgttattatttcggacagtttggacttggtgtaaaaacaggaattgatttaccgaatgaatctgctggtcagatgggtaagagtagtcaaccaggtttcttactagatttatcaattggacagtatgatacgtatacaccgcttcaattagcgcaatatatttcgacgattgccaatggcggatatcgtatgcaaccacaagttgtaaaagaaattcgtcaaccggcagtgaaaccagatgaagttgggaaagttgttcaatctatggaaccgaaagtattaaatcgtattgatatgccggaatcgcaaattaaacgcgttcaagaaggatttagacaagtgtataatgattcaggtggtacagctacaaagtactttacaggtgcaaaatataaagctgctgggaaaactggtacagctcaaactgtgtatggtggagataaagagattggtagaaatgcaaaaggtgaacgtgtggaaacatataacttaacattagtaggttatgcgccacttgaagatccagaagtagcattctctgttgtcgttccatgggtacatgatgataagactggtattaatggatatattggtcgtgaaattatggacgcttactttgatttgaaaaacaaagaagtaaatggtgaagctccaaaagatgataaagacaataaaaacaaagatcaagatgatgaataaaaaagttgtaaaaaagcacactatatgaaaagatagtgtgcttttttttatggtttatgcatatcgtgtaataaatgtggacaagtatacaacatttaaaaaacgcggccctataaatgatacttgtatatggtgggataggggataaatattttatagggaaatcatcagaggaaatgaatagctactactgaattaaaattgtatcgtatgttgatttttgtggaactttacaaaacttttacaaacaattaaaaccgaattaatagtttagcagtattcttatatctgtaatcctgttatttccggttacttctaggaggaagaacacgtgaaatggatgcatacaccgattaagattttcgtattatcaatatggttcctctgttttgaaatgtctactgcatttgctttaaatgatacgggagaagtgagagttgatggatcctcaacggtttttcctattatagaagcagtagcggaggaatatacaaaggtgcatccagacgtgaaaatttccatcagtatttctggaactgggggaggatttaatcgtttcagtaaaggagaagtagatataaataatgcttcgagagtaatgaaacaagtcgagaaaaatgaaatgaagaaaaactctattcagttcacaccttttgaggttgctaacgacggtcttacgattgttgtgaatcgccataatacatgggtagacgatatgtcagtagacgagttacgactactttggagtgaaaatggaagagagaagcgatggtcacaaattcattcaacatggccacgtgaacaagtgaagttttatgcaccaggcgtagactctggtacgtatgattattttcaaaatgtcatcttacaaaatcatcgcattgtaaaaaaagtctctttgtctgaagatgatcaagttattatgcaaggggtaatgaatgataaacatgccattgcttttgtaggatatgcttattatatggctaatcgagataaggtgaaagcaataaaagtaaatggtgtatttccgacgaaagagaccattcaatcaggtaagtataagccgttatctaggccgctacttgcttatgtgaataatgcatctatccgaaataaaatgaatgtagcaaactatgttgagtttatgattcagcatgtcggtaacctcgctgaagaggtcgggtatgtaaaattacgaaaagaaaaatacaatgaacagctgcgtatgttaacagaaataaaaaggtaatgtcagggtggaaaggggttttcatctttggctcataatgacaaaagtcaaattacattttctgtacaacatttgattgaaagaaatacaaaacaaagaaaaaaaaagcagcgaatcaatcgaatagtgcctttattactaaaaataattgctagcgtttctattgtgacgacacttggaattgtttttacgctctctaatgaaacaatcatgttttttcaaaaaatatcattatactcctttttgacggagaaagaatggttaccattttttgaagaccctaaattcggtatattaccactcatatgtggaacgttccttataactgcaattgctatgtttgtagcaattcctatcggtttagcgtgtgccgtatttttaagcgaatatgcttcaaatagtgcacggaaaatattaaagccgatgttagagctattagcaggtatcccgacaattgtatatggtttttttgcattaacaattgttacgccgcttttacaaaggcttataccagatttacagttttttaatgcgattagtccaggaatcgttatcggatttatgatgatgcctacagttgcatctctatctgaagacgcgatgagagctgtgtcgaaagggacgaaagaagcttcattagcactcggggcgacgcggtttgaaatggtaaaacaagtggtgtttccgtccgcttttacagggattatggcagcaattatattagcggcttctcgtgcaattggtgaaacgatgattgttgtaattgcagcaggatccacaccgaatgtatcgcttgatccgacacattctattcaaacgttaacagcctatattgtgcaagtaagtttaggtgatgctccgcatggaacgattacgtattacagcatgtatgctgtaggtgcaacgttatttttgtttacctttattatgaacatcatttcgcagtctattatgcgccgttttaggaggatgacataatatgcgaatgttgaatcataaaaaaatacaaaaaaacatggcatcacgctttttaaaagatcgaatttacaaattgttattttatatagcaattttattttcaatggtaattttgtttttgttactgtttcaaattgttgaaaaaggtataagttatctttcaataaatttctttacaaatttcgcttcacgtaatccgaaagaagctggtattgctgcagctttgtcagggacaatattatttatgagtattgttatacctgtttcttttatatttggagttggaacagcactttatttagagcaatatgcgaaggaatctctatttaaaaaaataatagagattaataatcaaacgttagcaggagtaccatccgttgtatttggattgcttggtttaactatttttgtatatgctcttcatttaggagagagtatagttgcagcagcactgacgatgagtctactcgttttaccaacagttgttgtggcgagtcaagaagcaattcgatcagtaccaagtgtattattagagggttcttacggattaggtgctacgaagtggcaaacgatgtatcaaattgtattgccatatgctttcccagggattataacgggctgtacgttagcgatatcaagagcaattggagaagctgcaccactattagttattggggcacttgcgtttgcaaattatgttccatttagtatgtttgatagatttacagttctaccaattcaaatttttaattggatgagtaggccacaagaagaatttcagtatgtagcagcagctgggatgattgttttgttaggtttgttgctatttattaatatatttgttttatggttacgaaatcgaaaataagttggaagtggatgaaaggggaattcaaatggtagcaacagtagtaaatgtacaggtgaaaaacgaagagaaaatcgagactgcgccaaagaaggtagtatttgatacgaaaaacttaaatttatggtatggggaagaccatgctttaaaagatattaatttaagtattcatgagaatgaagttacagccattatcggtccaagtggctgtggtaaatcaacttacttaaaaacattaaatcgcatggtagaattagtaccgattgttcgaactacaggtgtaattgaatatagagaacgcaatatatttgataaatcatatccagttgaagaattaagaacgcatgtaggaatggtgttccaaaagccaaatccatttccaaaatctatttatgagaatgtagcatacggtccaaaaatccatggtattcgtgacaaaaagacattagatgaaattgttgaaaaaagtttacgtggagcagcgatttgggatgagttaaaagatcgtttgcacgataatgcatacggtttatctggtggacagcaacagcgtctatgcatcgcacgctgcttagctattgagccagacgttattttaatggatgagccaacatcggcattagacccaatttcaacattaaaagtagaagaattaattcaagagctaaagaaagattttagtattgttatcgtaacgcataatatgcaacaagcagcgcgtatttcagacaaaacagctttcttcttaagcggggaagttgtggagtatacagatacaaacaaattatttacgactccttcagataagcgtacagaagattatattacaggtcgctttggttgatatcgtttcaaagctaagagcaaatgccctcttaacagagggcatttcttattttatcttactgttaatagagaactaatacttctccttatcttaaggtttattacaagcgcaagaggctatgtaggagatttaccccgctatttgcgggcagtaagacccccaccttaaaatttagcgaaagcaaagaagttagggaggggatcttgctgcctatcaaatcccgattgatgagggttgattaaagtttcacttttatataatggcacataatattgagggggaagaaaaatggtaagagaacagtttcaaggtgatttaaaagcgttacagcaaaaggtgatcgagcttggagaattagcaaatgcggctttattgatggctatggaaggtctgcatacaagggatgtagagaaagcgttagaggtcattgatggtgattaccgcatggataatttagaagaggaaataaacgatcttgcgcttatgctcattacgaagcagcaacctgtagcaagtgacttaagaaggatttttatttcaattaaaacagcgacagatttagagcgtattgcagatcatgctgttaatattgcaaaggctacaattcgtcttggggaaaaagaagtggctgttagtttgcacaacctggatgaaatgtttgcggttgcaaatgagatgttgcatttagcgctagaagcatatgaacaagaaaatttaacttttgcgaaacaaattgctgaaatggatgattccgttgatgaaatatatggaaaagcaattcgtgagtttatatcgtcggttccggaacaaccagaagcaattacgcaaattacacaattatcatttgtcgcgagatatattgagcgtgtagcagatcatattacaaatattgctgaaaatgtcttttatttagtaaaaggaaagcattatttattgaatgagtaggaataaaagcaggtgatgagaaatcacctgctttttttagtcaaaacatgacaaaaaaagctcgttgtttcctttagtttatgatgataagatgtatcataatgtaatggaaaaattagtatatatgtttgtcgttaataagtattatttaccaatttatagtaagcgctttcttgttgtttgaaacatacgtttttataggtgagaaatttaattatatggtcttctaaatgaggatttgtttaactaatcaagtttatgctgctagttcatgtgggatagggaatatacatatggtatatggagttactgaacattatataagtggaggctgaagtatatgaagggggttattttagctggaggaaaaggaagacgccttagaccattaacatgcaatactccaaagccgatgttaccattattagaaaaaccagttttagaatataatattgagttattacgtcagcatggtattcgtgaaattgcaattactgttcaatatatgagtacgaccattaagcaatattttggtgacggtagtaaatggggagttaacttgtattattttgaagactctcctccgcttggcacagcagggagtattaaacaagcagaacaatttttagatgaaacatttgttgtgataagcggggatgcattaactgactttcaattatcagaaggaattaggtttcatgaacaaaagaaaagaatggtaacaatgtttgtgaaagaagtagaaaatccactctcatttggattggttgtaatgaataaaaaccaggaggttacacgatatatagaaaagccgggctggaatgaggtagtatctaatgttgtgaatacaggcatatatattatggagccagaaatcttttcttacataccgcctaggcaattttttgatttcagtcatgatgtgtttccattattggcaaacaaaaatttgttattcgcatatttgtcagaaggttattggttagatatcggcacatttaatcaatatcgacaagcacaatttgatttgttaacgaaaaagttacaagtacctattccttatacagaagtattacctatggtatggatgggggaaggggtgacgattggtaaagggacgaaaattcatggcccctcttttattggagaaggagcaaagattggtacaggagctgtaattgagccatattctattattgggaaaaatagtatcgtttcaagttattctcatcttcaaaaaagtattgtttttgcgaatgcccacattgggaagtattgtgaactattagaaacgacaataggagagcgtacaatagttgaagatgatgttacactgtttcaaaaaagtgttgtagcggatcactgtcatatcgggagaagtacggtaattaagcaaaaaggaaaactatggccttataaggcgattgatagtcattcgatagtaggagcggctggtattcaagagagtgaaatgagtgcagggtggttacaaaaaagccgcattgtaggaagagggaatgttgaaattactccccagtttatcgtgaagattgcgatggcgtatggttctctttttgaaaaaggagaaagtatattaattggaagtcaagaaaatatagaaacaacctcttataaaaatttatttttacatgctattcatggtatagggattcatacgatggaatgtaaagaaatgaacgagtcactttttcaatatagtgttcatcatttgcaatgtgcaggtggtgttttcattcaagtggagaatgagaatgagattgttataaagttatacggtcaagctggcatgccgttaacgtataagcagcaaaaagagatagaacaaatatatatgtccgaattgttttattacgtgcaggagaaagaaatggggcgtaataagctcgttcatgtttctatgaatgagtatatagaagttatattggagcatattgatatcgagaaaatacagatgcagaagtttcatcttcttattaataagagaaatgatacgttgcaacatttacttatgctctttctgcaaagacttggttgtacagttacatggatttatgcaagcgaacaaaaagatcatgtgaaagctttgatgaaatcaagtaaagcgaatatggctcttatgttttcggagaaaggaaatcatttcgagttatacgataaacatagtaatatttaccaaggtacagattttgaagaggtagatattccagatttcttgctcgaatcgacaggaaatatttacccaatgtctttgaagttaggagaatgttatcttctattttatacgcaggatgaaagaaaatcgtttcaagtgaggtggaagcgagatattttatatcggattggaaaattattcgagctaatagcattgcaaggaaaaacgtttctcagcatagtagagcaatcacctccgctctatttactttatgatgaagtggtatgttcatggaatgaaaaaggggaaattatgaggaaattattggatgatatagaaaggaagggagaagggatatttgaaggagtgcagttcaaatatactgaaaaagagtggtcttatatcgtttctgacataaaacaaccaaaatttttggtgtattcacatgctagaaacccagtaatagcaagggaaaatatgaaaaatcttatagaaaaaattagacaatatcaaaaggtgtagaatttttattttaaaagtggtattatagtatagtctgatttaagttattagtactggagggaaataagaatgcgtgtgaatattactctagcatgtacagaatgcggagatcgtaactatatctcaaagaaaaataaacgtaacaacgctgagcgtatcgagcttaaaaagtattgcaagcgtgacaagaagtctacgttacaccgtgaaacaaagtaagcagtaggaatattttcctactgtttctttttttattcgattcctatgttaaaagtgatacactatcagcatagagtaaagtgtcactgtaagggggagaatgtgtgaaagcagagaaagtacgtttgcgtaaacaaataatagaacacatgaattctttatcagaagaacagtatacaactttatcagaacagattgtattttcgttgtatgcgcaaaaagagtgggttgaagctaaaacaattggaattactctttcaatggaaaatgaagtgaatacatatcctattatcgaaaaagcttgggaagaaggaaagaaagttgtagttcctaagtgtaataaaggaacaagaacgatgtccttccggcaaattaataattttgatcaattagaaacggtgtatatgaatttacgtgaaccgattcccgggcttacggaagaagtgaatatggatgaaattgatcttcaaattgtcccaggcgtagcttatacagaacgaggagagcgaattgggtacggcggtggctattatgatcgttatctcgtgcattataaagggaaaacgctgtcattagcgtatgattttcaaatggtaaaacacattccggtagagccatttgataaaaacatagaaaaaattattacagaaaaaggaacactgcttacaaataagcttgtatagacaaataaaaattgacgagactttttcttcttgattataataaaatatgtgaacgttttcttattataattttttatagtaagtgagcatagagggtgatgaaatggtatctatttatgatattcagcaattgctaaagaaatttggtacgattatttatacgggagatcgaattgcagatttacaattaatgcaagatgaattgcgtgaattaaatcaatcacagctaatcgatccacaagactatcaaacagctttatttttattgaagcaagaaattcaaaaagagctaaataagaattagataaaggtaggtaagcaacatggaagagaaatggttagttggtgttgaccttggtggtacaacgattaaattagcatttattaatgtgtacggtgaaattttacataagtgggaaatccctacgaatacaggtgagcaaggaaaacatattacacttgatgttgcgaaagcaattgataaaaagctagaagaattaggcgaattgaagagcaagttaattggtattggtatgggagctcctggtcctgtacatgtggcgtctggaatgatttatgaagcggttaatttaggatggaaaaactatccgctaaaagatttattagaagtagaaacaggattacctgttgttattgataatgatgcaaacttagcagcgcttggtgaaatgtggaaaggtgctggtgaaggtgcaaaagatttaatctgtatgacacttggtacgggcgttggtggtggtgtaatcgccaatggtgagattgtacacggcgtgagtggtgctgctggtgagattggacatattacagtcgttacagaaaatgctttcccatgtaattgcgggaagtctggttgcttagaaacagtagcatctgcgacaggtattgtacgtgttgctatgcaaaaaatacaagagactaataaagagagcatgttgcgttctatgttagctgaagaaggacgtattacatcaaaagatgtctttgaagcacttggacaaggtgatgaattagcaggtgaagtagtagaaaaagtagcctcttatttaggattagctgtagcgaacctttctagtacattgaacccagagaaaattgttattggtggaggcgtgtctaaagctggagatgcgctattagaaccaattcaacgctatttcgagcaatacgctttctcacgtgctgtaaagagcacgaagttagctattgcaacacttggtaatgatgcaggtgttatcggaggagcttggcttgtaaaaaagcacaaatacgaagcgaagatgatataagttgtgaaatatgaaaagaggaagggggaacccttcctctttttgtgtgaaatctcgatgaagaataaagtgtaaacgaattaagctgctggtggatacccgttatatagaacagtcatgatcgtaaaccatccgaaaacgagtacagttgcaattgcaaagccgctcgcgaaaaagtttttttcacgaagtgttctaagcgtagcaaatacagctaacagagtgacaagtgtaaaaataataacaaggcccatacaatatcctcctctgtctacccatttcttattatgagtttttggaatatttactcttttatattgtacatgttttaaaaatgattgtcgagatagcatcctttcttttcctcagagaaagaaatgttgtatcattaaaagtaagtttaataactggaggagattttcatatgaaatggatacaaatgccgttaggcccattacaaacgaatgcttatattttaatgaacgatcaaaaagagtgcattatctttgaccctggtcatgaaggtgaaaagctcgttacatatttacaagaagaacaattaaaaccattagctgttttattaacacatgctcactttgatcatatcggtgctgttgatgcggtaagagacacttttcatattcctgtgtatgtacataaagaagaagcagattggttaggagatgcaactgtaaacggctctcaaatttttatgatgaaccgcagtattacagcaaaaccagcggatcatattattgatgcagaaggtacattaacaattggatcatttaattttgaaatttttgagacaccaggacattctccaggaagtatttcttattatagtaaagaggcgaatgctgtattctcaggagatgtattgttccaaatgagcattggaagaacagatttacctggtggaagtttcgctgaattaattggaagtattgaagagaaattatttgtattaccagatgaaacagcggttttatgtggacatggtccagaaacaagcattggctttgaaaaagaaaataatccgtttttacaataaggagtcattatgggaatggagctcattttaagagaatggatggggaaagaaaaggattattcaatttcatatagtacgtatatgaaccttgtattgtatacagaaggtcatggatattatatgaaagaacgtgaaaagattggaagacaaggggatttttttacaagtagcaacgtatcctctgtgtttgcaaaaacttttgctaaactttttattcgtcttgttgaaaatggtgaagttgctccgaatatttgtgaaattggcggaggaacagggaagtttgcctatgatgttttacaagaatggaagcaattatctccaaaaacctttattgatctaaactattcaatgattgaagtgagcccttttcatagaaaattacagcaggagcaccttggctcattttctaatgtatcgtactatacctcctatagtgaaatgggagattctttcgagggaattcttttttcgaatgagttgtttgatgcatttcctgttgaaataattgagaaaagaaatggtatgttgtatgaagtacgtattacatatacagaggaaggaaacctttcagaagtatgtaggccgttagataaaagaattggtcgctatttattgaaatataatattcatattgctgaagggcaacgttttgaagtaccaattgtgatggaggagtatataaaagaaattgcgaaatggtttcaaaaaggtatatgtattacagttgattacggatacacaaaagaagaatggatgtatccagcacaccgtgaaggaagtttgcgagggtattatcagcataagctaatacgtaacccactagcgcatccaggtgaaatggatcttactactcatattcattgggacgagctaaaggagatgtttagtatgcaaggaatgagtgcagtatggcataagaaacaatctgagttcttgttagctgcagggatattagaacagcttacgagccatcaagatatgaatcctttttctgaaacgcaaaaacaaaatcgagccgttcgttctatgattttgaatggaggagtagggagtgcatttgatgttgttatacatacaaaagatatgcaacatttacatttggatcgatatgtaacaatataaaaaaacaagacacagtatatactgtgtcttgttttttaatacgacttatgtagtattatatatttcctctcatgatatatatttatattaaagatatgagatgaaaaatatagaatacgttctttttcttcgattattagtccctaacctaataatacgcgaacgagttgaatgattgtttcattctctactttgtaataaatttccaatccttttctttcactagaaacgattttagcgctttttaattttgctaaatgctgtgaaattgtagattgtggcatgtttaagccagtatacattgtagaaacgttgcttggaccgcgctcgattaatccttttacgatacataaacgaacaggatgagctagcacttttaataattctgcattactttcatatagttctaattctttttgaaaggtttctaacatgttcttttccacctccgtgtgagctattataccatactatacataccaaaaatttaaagaaaagaaaatagttgttgcagaaaaaaagtcctaaagtaaagaaattgtaagaaaagagaccctgatgtaaataaaataggtaaattagcatgtttttgtaaaatgacatttttgggtgaaaatttcgatgtgttttaaaaattgaaagatatagatatatttgtaacacaattttatcatgattttcttattctttcaaatgaatatacaaaatttttaaaataatatgacaaaggaattataatgatatatatagaatataaaacaggttaaaagaaaagaagctgaatgtaattcgcttctttatggtgataatgaaatatttgcttacggctgataaatcttaggatgatcaagtcattagtcatttattctaaaattcatcttttagcaacgttaaaaacctgtgattccatatgttctcataaaaatcaattgtctcttttgcggacataaaaggattattcaacgtagaggttgttttctgtaccataaagttttcgtatcctagtccgtgggcaaacttaatcgtagcatccatacagtactctgtttgggcgccacaaaattcaatgcaatttacagataattgatctaaaatttcttttaagtttgttttataaaatgaatttgcatgtgtttttcttacaaaaaaatcttgttcttgaacatctagatcggtatgaatagcccaaagttctttctcgggtactaaatcatcatcacaatgttgaacaaaaaggattggtttatttaattttctgtatgaataaattcttttatttacttttgttagtaagttctgtaaatcaaataaatgctcctcgctataacatacgccattttgtaaatcgataacgattaaaatatctgaacaaatatccattattttcacccctttttatttcttaatatatcaattaatccattatttagaaatagatgatatacttttatttttttatggactataagaaaagaagaaattcaaatgaatataactaaaacgcagaaaaagaagatatgaaaacctaatctcatatcttctttttctctatgcatttacaggttcttctacataagaaagggcattttcaaaatcggatattaaatcgttaacattttcaagaccgactgataaccgaagtaatgaattagagattcctctttcatcacgagcttcttgcgacagtgctgcatgtgacatttttgctggataagaaagaattgactctacagctcctaaactaactgcaaaaacaggtaattttacttttgataaaaattggcggagtgcatcttctgactgcaaagtaaacgataagaccgctccagctgatgttgcttgagattgttgaatatcaaatccgagatgtgtttgtaatcccggataatagacattttgtactttagcgtgctcttgtaaataatgtgcgattttattggcatttttagctgaatgctcgaggcgtacgtgcaatgtttttagaccgcgaagtacgagagaacaatcttgaggtcctaaaatagcaccgaatgcattttgtaaaaatccaagcttttgagcgagttctgcatcttttactactgctaatccggcagtaacatcactatgaccagcaataaattttgtagcactatgaagaacgacatcagctccaagttcaagtggtttttggaatagtggtgtcaaaaatgtattatcaacaaaagtaagagcgccaatagattttgcgagtttagaaacctcgcgaatatctgtcacttttaaaagtgggttagaaggtgtttctacataaaagagctttgtatttggtttcatgttttgttttatttcttctaaattggtcatatcaacaaatgtatgtgaaacaccgtaacgggagagtacctcagttatcactcggtaagtgcctccgtacacatcttctgaaatgagtacgtgatcaccttgtgaaagaaggaggaatgcagtggaaatcgctgcaatgcctgatgcaaaggcgaatccttttgttccgccttctaataaagtaatgatatcttcaagagcttcacgagttggatttcctgacctgctatagtcatattttccgaacgtatctacatcaaactggtgaaaagttgatgtgttataaataggaacgttcacagcgcctgtttgcgagtcatgtttatattggttgtgtagtaagagtgtatctatagaatagctcatattcttacaccttcttttacgagtttaatggcttgctttaagtcttgaattaaatcgttactattttcaatgccaactgagaatcgaagaagacgattgcatacgccgtttgctgttctaatttcttcaggaatatcagcatgtgtttgcgttgctggataagtcattaaactttctacaccaccaagactttcggcaaatgtaattaaggataaagattgtaagaatggattaatccaagcttcatctttaaggcggaatgaaatcatgccgcctcttcctggataaaatacatctgtcaccccgtcttcatcatttaaatacgcaacaactgctttcgcattttcttcatgttgtctcatgcgaagcgctaacgttttcataccgcgaattaataaccatgagtcaaatgggcttaaaactgcacctgatgcattatgataatgagcgatttcctcgcaaagttcctttccttttgcaacgacaagcccgcttagtacatcgttatgtccccctaaatatttcgttgcgctatgaagtacaatgtcagcaccttctgttaatggttgctgtatataaggtgtgtagaatgtgttgtctacaataagaagtagtccgtgccttttcgctacagttgcgacagcagcaatatcagtaacttgcattaatggattagttggagtttctatgaaaatagccttcgtttcagttgtgatagcttgctcaatttgtttaatagactgtgtatttacgtatctacatcgaacattccactttttttcatgctcagaaaataatcgatacgttcccccgtataaatcttcagatacaataagttcgtctccagagcggaatagagaaaggacgaggagaacagccgccatccctgaactacaggcataaccttgttcgccatattctaagtctgcgatcgcctgttctaaaagaccgcgagttggattgccagttcgtgaatagtcaaagccagtagatttaccaattccttcgtggcgataagcggttgagaaataaactggtggattaaccgttccagttgtagtttcactacgatttccgatttgtgctagttttgtttcgattgttgacatgtgaaaattcctcctttttaaattgaaacattaagtgaatataaaataaaaaaagccttctaagaagaaggctttcggtttgaatagagtcttcttctcatctgtcaaatctttcacaatttgctggaattagcaccttattaacaaaatgttaatggttgctgaggcgtcacagggccagtccctctacctctctagataagaatgttcgtatgaaatttttattatgtttttaactttacaataaaagataattgaattgcaactttattttaaataatttttatttttccgcaagtgtcattgacttttaattttgtgcatgctaaatttattaaaaaattaacaaacattgttaaaaggggaacgcatttccttttagctacataaataaaataataaagacaactcttattgagagcggtggagggaaaggccctgtgaaacccggcaaccttcaaacgaaatgtttgaaacggtgctaatacctgcaaaacgaatgttttgcataataagaggaggaacaattatgtccccctcttcaaagtgaagagggggtttttatattgatagaaatgagggagattcgtgaaattactagatttattatcaaaaggaattgtaataggtgatggtgcggttggaacgttattgcattcacatggtttgcaaagtagctttgaagaattgaacgtatctgatccagatctaattatatccattcataaacaatatgtagctgctggagcagatgtaattcaaacgaatacgtatggagcaaatgaggcgaaattacgtatgtatggtttagaaaatcaagttacaaaaattaatagagcggcagtgaaattggcgaaagcatctgtgacagataaaaatgcaattttaggaacaattggtggtatgaaacatatcggagctgttacaacgactgatatggaaagggagtttatgttacttgaacaggcgggggctttactagaagaacaggttgatggattactattagaaactttttatgatgaatttgaattacttcatgctgttaaagtgttgcgtaagcaaacgaatattccgattgttgcgcaattagcgttacatgaagcaggtacgactcaaaatggaaatgatgtcaatgaaatattaaagcagtttatagattacggtgcaaatgttgttggattgaattgtcaactggggccgcttcatatgacggaagctttcaaaatgatatcgattccgcaaaatggctatttatcagcatacccaaatgcaggtctcccgaattatgtagagggacgttacgtatatgagggaagtccagcttattttgaagcaatgacaccgaattttattgagcaaggtattcggttattgggtggctgttgtggtacgactccagaacatattcaaagtatgaagcgcgctgttgcgaatattacccctgtaatagaaaaagaaacgattcaaaggccaaaagtcgttcatacgcatgagaaacgttcgaaggctcacgtcactctagcagagaaagcaaaaaaacaaacgacagttgtagtggaattagatccaccgaaaacgttagatacacagcgtttttttgaaggagcaagagcgttaaaaagagcgggagcagatgctattactctagcagataattcattagcatcgcctcgtgtctctaatatggcgatgggtgcgttattaacgaagcatgatatcccagtattgacgcatttaacgtgtagagatcataacgtcattggactacaatctcatttgttaggtttatcggcgttagggatggaagaagtgttagctttaactggtgatccagcgcgcgttggtgattttcccggtgccacttctgtatatgatttatcctctattgagcttattaaaatgattaaagaaatgaacgatggacgttcaattttagggaaatcaattggaccggcgacaaggttttctgtaggcggcgcatttaatcctcacgtgaggcacttaaaagcagcagttaagcgaatggaacgaaaaatagatgctggagcggagtattttttaactcagccaatttacgatatcaagttaattgaagaagtgtatgaagcgacaaagcatttggaacaacctatttttattggaattatgccgttagtaagtaagcggaatgcagattttcttcattttgaggtgccgggtattactcttcctgaagaaataagagagagaatggatggacatgaaacgaaagaggcagcaattgaggaagggattcgcatttcacaagaattggtcgacgcagcgatgaaatattttaatggtatttatcttattacaccatttttaaagtatgaaattacagaacatcttgttaaatatgtaagagaaaagcaagaagtgaaagaaggtattaattgatgaagtgtatagaagaaaaattgaaaaatagcattttaatattagatggtgcaatggggacaatgattcagcaagaggatttaactgctgaagatttcggaggagaagagtacgagggctgtaatgaatatttagtggaaacaagaccagacgttattttaaagattcataaagcttatattgaagctggagcggatattattgaaacaaatacatttggggcaacgaatattgtactaagtgattatgagctgtctcatttagatgaagaactaaatgaaaaggcagcacttttggcgaagcaagctgttaaagaaagcgggaatgaagtatatgttgcgggagcgatgggaccaacaacgaaagcaattagtgttactggtggtgtgacttttgaagaattgattgaggcttatacaaggcaggcacgaggattattaaaaggagaagttgatgtattactcgttgagacgagtcaagatatgcgtaacgtgaaagcagcttatattggaattcaagctgcttttgaagaactgaaaaaaacggttcctattatgatttcaggtacgattgagccaatgggaacgactctggctgggcaaacaattgaagctttttatttatcagtagaacatatgaaaccattatctgttgggttaaactgtgcgactggtccggagtttatgagggaccatattcgttcactatctgatttatcggagtgttacatttcttgttatccaaatgcaggtcttcctgatgaagatggacattaccatgaatctccatcttctcttgctgaaaaggtgaagcgatttgctgaagaagggtgggttaatattattggtggttgttgtggcacgacaccagaacatataaaagcaatgaaatccgcgctagcatctcttaagcctcgtgaccatcatgagagagaaggacatggaattagtggattagaagcactgcaatatgatgagtctatgagaccgttatttgtaggtgaaagaacgaatgttattgggtcacgtaaatttaaacgattagtagcagaagggaaatttgaagaggctgctgaagtggcaagagcgcaagtgaagaaaaatgctcatattattgatatttgtatggcagatcctgatcgcgatgaaatagaagatatggaaaacttcttagcagaagttacgaaagttttaaaagtaccgattatgattgattcaacagatgaaaatgtgatggagcgagctcttacttatattcaaggaaaagctgttattaattcaattaatttagaagatggagaagaacgatttaaaaaagtgacaccgcttcttcagaagtatggtgctgctatagttgtaggaacaattgatgaagacggtatggcggttagtgcggagcgaaagatagaaattgcgaaaagaagctatgaattacttacaaagaagtatgggatacgcccgtcagatattatttttgatgcacttgtgtttccggtagggacaggtgatgaagaatatattggttcagcagcagcgactatagaaggaattcgccttattaaagaagcgttaccagagtgtttaacgattgtaggggtaagtaacatatcatttggtttaccaccggctggacgtgaggtattaaattcagtctttttatatcatgctacgaaagcagggttagattacgcgattgtgaatacggaaaaattagaacgctatgcgtcgattccagaggaagaaaaacgccttgcagatgcactactgtttgaaacgacgaaagagacgttagaagaatttacaaacttttaccgagttgctaaaaagaaagatatcgttgtgcaagaaacgttaacgcttgatgaaagactagcaaattatattgtagaaggtacgaaacaaggattacacgaggatttaagtcttgcgcttgaagaaggaagaaaacctcttgatattattaacggtccgcttatgacagggatggatgaggtaggacgactatttaataataatgaacttattgttgctgaagtattgcaaagtgctgaaagtatgaaagctgctgtaagctatttagagccacatatggaatctagtgatagtgcgaaaaaagggaaagtattattagcaactgtaaaaggtgacgtgcatgatattgggaaaaatctcgttgaaattattttagcaaataacggatatgagattattaatttaggaattaatgtacgttcggatcgaattgttcaagaagtacaagaaaagaagccggatattataggcctttccggtttattagtaaaatcagcgcaacaaatggtaacgactgctgaagatttaaaagcagcaaatattgatgttcccattgttgtaggtggtgcagcgttaacgagaaagtttacagataatcggatttcaccatcatataaagggctcgtttgttatgcgagtgatgcgatgacggggctcgatattattaataagcttcaaaaagaagaagagcgtgagaagatgaaacaggataaaaaagaacgtcatcttcatatcgtaaaaaaagaggagaagaaagtagaaattccagcagtaattgagtcattaccgaaggctgaagttatcgtgcctgattcaacaaaacgaattgtattacgcgatattccggcccttcatctcgctccatttttaaatagacaaatgctacttgggcatcaccttggattaaaaggaaatgtgaagaagcttttgaaagagggagataagagagcacatgaattaaatgatttaatagatgaattattgcaggaaggacaatcttggttaaagccgaaagcagtgtatcaatttttcccagcgcaaagcgacggacaaaacattgtaatatatgatccagaagatcatacgcgtgttatagagcgtttcacattccctagacaaggaaaggctccctatcgtactttaggtgattatttgcgcccaataggagatgagatggactatgttgctttcttatctgttacggttggggaaggagttcgggacattgctgaagagtggaaggcgaaaggtgattacttacgtagtcatgccattcaatcgttagcgcttgaattagcggaaggacttgctgaaaaaacacatatgctcattcgtgaccgctggggcattccggactcacctgaactgacgatggaagaacgtttccgtacgaaatatagaggaatacgagtgtcatttggttatccggcgtgtccagaacttgcagatcaagaaaagctatttcgcttaattcatccagaggaaataggtatttcattaacagaaggattcatgatggagccagaagcgtccgtaacggctatggtattttctcaccctgaggcaagatattttagtgtattatagtctagaagggggagacgtatgaagaaaatagtctttacaggtggcggttcggcaggacatgtaacacctaatttagccattatcccatatttacaggaagacaactgggatatctcttatattggttctcatcaaggtattgagaaaacgattatagaaaaggaaggcattccctactatagtatttcgagtggaaagctacgtcgttattttgatttgaaaaatataaaagatccttttcttgtaatgaagggtgttatggatgcgtatgtaaggattcgaaaactaaaaccagatgtaattttttcaaaaggcggtttcgtatctgtaccagtcgtaattggaggatggctaaatagagtaccagttttattacatgaatctgatatgacaccaggactagcaaataaaattgcgcttcgttttgcttcgaaaatatttgttacatttgaagaagcagcgaaacatttaccgaaagaaaaagtaatatatacgggatctcctgtacgtgaagaagtgctgaagggaaatcgtgaaaaaggtttagcgtttttaggtttttcacgtaaaaagccagttattacgattatgggaggcagcttgggcgcgaaaaaaattaatgatacggctcgagaagcattaccagaacttcttaaaaaatatcaaattgttcacctttgcggaaaaggtaaccttgatgaaagtttacaaaataaagaaggatatagacaatttgaatatgtacatggagaactgccagatatattagcggtaacagattttgttatttcacgcgcgggctccaacgcaatttttgaatttttaacattacaaaagccgatggttttaattccattatcgaaatttgcaagccgtggagatcaaatattaaatgcagagtcctttgaaaggcaagggtatgcctccgtattatatgaagaagatgtaactgtaaaatctcttataaagtatgtcgaagaattgaatcaaaataatgagaagtataaaacagcactaaaaaaatataatggaaaagaagcaattaaaacaatcattcaaaatatttcagaggcatgatgaaacaatcatgcctcttttagtagggtgaaagattccaagaattgatatttttatgttacaataaagtgaaactttaatcagttgggttcatcccacatctaacttctttactgttactaaattttgaggaggtagtcttactgccctcaaatagcgggataacaaatgggttaatagggaaattccaattaatgaggcgtgaaaatacgaatggattaggagtgactgtgttggagctaagtctctatgaaaatactgcacttattatatgctttgtgttgtacgttggtagtgttattgtttatatttcaaggaaattttcgcaagaaagagagcttgaaaagtcagagataacagctgaactagaaatgttagctgatgaaagttataaaaaacaaaaaataaaagaagaccatgaagcatcccatcatttaaacgcaaataagttttaaagatggggattttttttgaaattgttctttattatagctataacaaataacgctaaaaaggagtttccccatacacaatgaaggagtgtatataaatgaatttttatatcgcctcaggtttccaaaataaacatcttgtacattccgtagcaaatgaactgaaacatgcaggatggcaccatacatatgattggaccaaaaatgaaagagcagcgaatgaagaacaattaagagaaattggtcaggcagaacgaaatgctgtaaaagaagcggatgtatttttacttatattagatggcggaaacgggagccatacagagtttggaatggcgattgcactagagaaaacgatatatgtatatcatgcaggaaacccgctccaaacaacgttctatcacttgccagaaataaatatttttgaaggagatgtagctgagtttgcatcttttgttatgaatcatgtgaaataatagtaactacctaaaaggttataaaagtgatcttttgggtacagtgatgataagaaacgtatataaaggagtacataatatgaaattagaaaatggatgggaaacgagctttttagaagtcgtacaaaatagtgaatttaagaaagaggcacttcttagtcaattgctttgtcaggatagtgaagaagtagaagagcttgtggatgattacggctacgaagaacttgttgaacgtgaacatgatgatgagttagctgaaatcttaggagaagaactttttagtgagatagaacgccaagtattcttatcttcaaacccagaagaaaaacttatttcattcgtcaatggattaggttttcatgtgctagattggatcgttcttcttgaaacagaatttggcattgatagtgcaaactttacatcagatgctgtgaaggtgttagaaaagcgtttcagacagtttccatacatagaggacaagacaatttttgatatgacatttggagaatcgatggatgtattagaatctgttacaggattacaactaaaggaaaagatgaacgtataatgaaaaaagaacgtgattggatcacgttctttttttacataataataattttatcatctagttttgtctgcccggtaagaagtgcgtttaaatattccacttttcttatacaagcttgtatatgtctttcaatctcttgtaactctgcttggtgatgcgtttcaattggatgaatttgtacgttgaatttttcaaattgactactatatgttatttctgcatagccgctcataatatcggtttcgttatgaaataaaaattgcttcgttttgtcacagaatgatacatcctgaaagccatatacttttaatgcttcaattacttttttaatcatttttgtattcattttttaaccctctttacgaagttctacttatatattataacataaaaaattacatagaaagcgcttccaagtgtgttttattataaactttacgtttcaatcacaaaaatgaaacaaagaaaaaataattgtaaagaaggaaggactcttttattgtttcgtcatatatatagagaaatagtgcaatgaaaggaaattttccgaggtggagatcgtatttccaatttgagcgcagtaaaagaggtgagaattttgaactttgatattgtaggacaaaaagcatatataaaagatggaccgcatcggaaccgaattggaattgtaaagaaaaacgagacaaaattagcatcgcagtttgctattgtaattggagaacaaatcattgatgtagagctaaaggatatcgtgttagttggagtagacgtaggacaatttcataaatggtgcgaacaaaatggttatttgtgaaaaggacgggctgtgagataatgaaatatatttgaggaaagaggatatgttatcatattctctttttctatgtttcaggaggcgaaaatgaaatataaagaacaggagtttacgttggagttaaaagagaacattcaatgtatggagaaggaaatagagcgaatattacttaaactgcataaagagtatgcgcatttatacatagaaaaacacatggaattagatatgggatttgcaagagaaaaagagaatccctttgaggtgggctattattcatcagttgccatagctatattagatgaagaaaaagagatgattgaatttcactatattccaatttggaaatgcgaaagaatctttttaggaatgtcaattcaatcaaacatttttgggagtaagaaagtaggggaacttgttgatgaatcttgttatgagattgaggaggagttaaaagagcaactagaagaatacttggagtaagaattctcaagataaaatctataaagagggaacggaataaaaaagacgctaacaattgtatgttagcgtctttttttcattatgaagcaatttcaccagtttttgtatcatcttgattgtacgtatcttgatctaattcaccaagccatttacttgaaataagacctgctgtcatagaaccacttacgttaagagctgtacgccccatatcgattaatggctcaaccgagataactagagcaacaataccgattggtaagttcattgtagatagtacgattaaagctgcgaatgttgcgccgccaccaactccggcaacaccgaatgagctaatagcgataacagcgattaaagttaaaataaattgtggttgtaatggatcaattcctacagttggagcgaccatcattgcaagcattgctggataaatacctgcgcaaccgttttgtccgatagataccccaaatgaagctgcgaagtttgcaattccttcggaaataccaagcttttctttttgagcttcaatatttaatggcatcgcaccagcactagagcgagatgtgaatgcaaaagttagtacagggaacacttttttcaaatattgaattggatttaaaccagacaatgcaattaataataagtgaatgataaacattacgataagtgctacgtaagaggctaacacgaagttaccaagttttaaaatagcatttatatcgctaccagcaactgtttttgccataagagctaatacgccgtatggagtaaggcgtaaaattaatgttaccatacgcattacgattgcatatacagcatcaagcattttcttaaatagttctgcttgttctggatattttcgttttacacctataaaggcaatgccgataaaggctgcaaatattacgacagaaattgttgatgttggacgagcgcctgttaaatcaagaaacggatttgtaggcaatagctctaataatttatctggaattgttgtcttttcaatagaagtaaatctttcttcaactagtttcagacgagcagattctgcatcaccttgttgcaagcctgctgcagatacatcaaatcctgcacttgcagcgataccgacagctgcagcgattcctgtagtaagaattaaaattccgataataagaccactgattttaccaaggtttttcgttaactgtaattttgtaaaggctgaaataatagatactaaaataagtggcataacgatcatttgaagtaatttcacataaccgttaccgattaagccaaaccaagtatttgattcaataattattttagaagttggttcataaataaattgtaatataagaccgaatataattccgactcctaaagcagtaaatacacgtttattaaaagatacatgcttacgttgcatataatataatacgccaactaaaatgagcatgactgcaacgttaattccgacaagcagtgtattcatgttgattccccctaattccaatctgttatatagaatataaggcaataaaacccataagtcaactaggaaattccggaattaaaaaaagatggcaaaatgccatcttttaatgtccagccccagggacaagtaaaaacgtcgtgtagtatgtaaatcctatgaagaaaacagttaaatatgccccaaatacgtatatatacatacgctctgttaattttaaatagcttaaaagtacgaagaaacctgtttgtcctaaaaatagtagtgcggtctgttgcatatcccctacgtaaaacataaccgagaaaattccagtccaaaagccgagaacgcgaaacatgcgctccatgccatctccctccttttctaaaaaaagtaaacctcacctcattatagtttatttttcttactattgtaaatattcattcacataaaaagaagccaattattattggcttctttttatgtgagaaattaaattgttagtttataattacaagatttacatccatctaatagactatcatttcgagttaattccatgttagggaataggatttcaaaaattcctttcatcatatctccgtgcatgttacaaatttcagttggatgatgaacagcaacttctttaaatggacaattgtgtacatcatagaaaatttttgttccatctgcacttaattcaaatgcaggtgataagccagctgttgagaaagcttcttttgcaatttgaactttttgttccactgttaaagcatcttcactcacatttaaacgttgcatatgttgttgcattaattcagctccgaattgttttcctgtttcgtatagcgctttctcaccagcagcgccaaggctaagtaaagaattaaatgcgattcttgctaacaattgataatcacggaatggaaattgtaattggataacatcttcagataagacatataatctgctcggtcttccgccttttccagttttcttcgtttccgattttagcatatgaacatcttctaatttagataaatgtaaacgcgctacgtttggatgaatatcgaattcatctgcaatttcttgtaccgttacgtaactatgtttttgcgaaatatatttataaatgtaataacgagttgggtcagataatacacctgtaatttttaaagcttgttccatgaggatctccacctttatcactttatccaagataataacattataatacagataaacattattataggtaatttcagacaataattcggaaattgttcataatttcacaaacatatttttccttttccctctattgaaaatacaaaagtccaaatttttattgcgcatgttttcatgctatatacatagtgaggagggaaaagtgatgaatgggattgaaatttttgcgaatacaattttaaaagaagcgtgtagggtacaagcgtcagatttacatattgtgccccggcagaaggatgtagcagtgcaactacgtataggaaaagatttaatgacgagacagtgtattgaaaaggagtttggagaaaaactcgtctcacatttcaaatttttagcatctatggacataggagagaaacggaagccacagaatggttcgttgtatttgcaaattgatggacaagaagtgtatttacgcctttcaacacttccaacagtatatcaagaaagtctcgttattcgccttcatttacaagcatctgttcagcccttatcacatctttcgttatttccaagtacggcagcaaaactactctcgtttttacgctattcacaggggttactcgtgtttactggaccgactggatctgggaagacgacgacaatgtatgcattattagaagtaattagaaaaaagaaaacacgtcgcatcattacacttgaagatccggttgaaaaaagaagtgacgatgtattacaaattcaaataaatgaaaaagcgggtctcacatatgaaacaggattaaaggctattttacgtcatgatccagatattattttagtcggtgaaatccgggatgaggaaacagcaaaaatagctataagagcaagtttgacaggacatttagtaatgacaacgctgcatacgaatgatgcgaaaggagcaatcattcgtttcatggattatggtataacgaggcaagagattgaacagtctttattggctgtagctgcacagcgacttgtcgaattgaagtgtccgttttgcagaggaaagtgctcaactttatgtaaatcaatgaggcaagtaaggcaagcaagcatttatgagctactatatggacatgagttaaaacaagcacttaaagaagcagatggagaatgtgttacttacaaacatgagactttagaatcgtcaatacgaaaaggatatgctttaggttttttagaagaagatgtttatgtttaagaaaacttggagtttaagtgatcaagtagtattgttgaaacgtttaggagaattattagaaaaaggctactctcttttacaagcattagaatttttacagtttcaattacctgtagaaaagaaagtacaattgcagcgcatgattgaggggttaaaagatgggaaaagtctacacgattcttttcatcagttaaagtttcatcaggacatgttaagttatctattttatgccgagcaacatggtgatatttcttttgctttgcaacaaggaagtgtacttctttataagaaagataagtataggagagacatgatgaaaataatgcagtatcctatgttcttgatgttttttctactaatcatgctttttatttttaacctcattttattacctcaggttgaaatggtttatagttcgttcggttctaatacaccactacttacagaacaaattttaagtgcaataaaactgctaccatacattattttaaccgctattttaactgttattattggatgtagtttatacatgttgtattttaggaaacttccacatattagacaggtaaaaatcatgcttcgtattcctctcatcaaaacatttcttattttaaagcattcacattattttgctactcagttgagtggtttattaaatggtggactatcagtatgcgaagctttaacaataatgatggagcaaagatatcatccgttctttcaatatgaagcgaatcggattgaaagacaattaattggaggagaacagttacaatctatcattgctaaaagtgggtattacgagaaagaactttcttatgttattacgcatggacaagcaaatggcaatttagggattgaattaggtgactatagcgatcttattatggaaaagatagaacgaaaaattaaacatatgttagttatcattcagcctattttatttacatgtattggaggaatcgttgtccttatgtatttagcgatgattatgccgatgtttcaaatgatgaattctatttagggggcatttgtatgcagaatgaggaaggatttactctgttagagatgctattagtaatggttgtcataactatattattactattaattattccaaatgtagttacacagcgttcatcggtccaaggaaaagggtgtgcagcttacgtgaaatctatagaagcgcaaatacaagtatatcaattacaacataataaaattccatcgttaaaagaactggcagatgaaaagtatattacaactgataagtgtccgaatggcgaatctattcatatatcagatgatggcacagtatcaattagggcattgtgaaacaacaagggtttacttttttagaaatgttactcgttttatttgttatttctgtattaagtatagttacgtattttagtgttcattccttatacgagcgacaaaaagttgaacaatttttgagacagttttcaaatgatattttgtatatgcagcaattagcgataaaccatcaaaagcactacacattacgttggcataaagatagaaatatgtatgctataaaagagtcaggtacaaagtattatatcgtcaagcgagagtatgaagaagatatacaaattgatttgcatacgtttccaaatccgatgacatataacccaagtggaaatattaatagaggtggtacgattataatttcgtatagaaattataaatatgaaattgtatttcagcttggaagagggagatttacgtatcgtgaaatgtcaaaaaggatccataatggctgaaatgattgtatcgttaagtgttttaatgatggctgtatcgttactactaccgcaaacagtattagttatgcaagaaagaaaaaatatacaaattcgttataaggcaactggattattaaaaaaagaagcagctatatatatgtatggaaatgaagaaaagcgaataatagaaaagaatataaatggaattgtgtattacacatattggggaggcaatgaagtttgtaccatgtggaaagatgtgaaagacagaatgatggaacaatgcttttatgtaggagaaaaaataaattagaatttggtttttcattaatagaaatgattgtatgtctgtttctattatcaatattttttttgctctttccccgcctacatttcattgaaatggaaaataaacagtcgaaagggttaaatgattgggagtgggatgtgtatttagggcaaatgcaattggagtttcgtgaagtatcatctggagaacagctagcatttgaaaatggagaaagtattttacaattccgatcgcgtaatgggagtgaagtatcgtatgaaaaagagaatagtcgtcttataagaaaggtaaataggcgcgggagggaagtcgttttacaaaatattggaacggtttcttacaaactaacacctcatgtactcattataaatgtgaaagatactagtgggaaaatatatgaaggtgtagttatgcgatatagcgaaataggaataaacgtatgagaaagcaaaagggatttacaatgcctggaacgattatctttcttattttattaacttctttttttatatacgaaacaaatatgttgtttacagataaaaatttttatataggaatagaacaaaaatttttattggatgaattacttaaccgatctattacagatataaaaaaagacttacagcaaaaagaaaaagaaggtacatttttctttcagtatgaaaagggagaagcgagtggaaattatgtctttgaaaatgatttaattctcgttgctttgcagtgtacactcaaacaggaagctttctatacggtgagttttcggtatagaaaaaaggatgggaaaatagtcgattggatagaaggataatatgtaaaatatatatatagataaaccaggatttcctattgtaaattgaattgattttttagaagaaatggataaatataatgattaaaagtttaaattttctcaaaaaagagaaaggtagaaagaatatgatatattcatgctatccaatcattatttttagggagaatagggaaatgacaaacaacaatcaaataggtgaaaataaggaacaaactatttttgatcataaaggaaatacgattatgacagaagatagagaaatacacattatttcaaaattcgaagaacctcttattgtcgtattagcaaatgtactaagtgatgaagagtgtgatgaattaattgaaatgtctaaaaataaaatgaaacgttctaaagttggttcagcacgtgatgtaaatgatattcgaacaagtagcggtgcatttttggaagacaatgaacttacttcaaagattgaaaaacgaatttcatctatcatgaatgttcctgcgtcgcatggtgaaggattgcacattttaaattatgaagtggatcaacaatataaagcacactatgattattttgcggaacatagtagatcagctgctaacaatcgtattagtacgcttgtaatgtatttaaatgatgtagaagaaggcggagaaacgtacttcccaaaattaaatctttctgtacaccctagaaagggaatggcagtatactttgagtatttttatcaagatcaatcattaaacgagcttacgttacacggaggggcacctgtaacgaaaggcgagaaatggattgcaacgcagtgggtgagaagaggcacttataagtaaaagcgagtgttacgttttgttcttcatagtataagaacaaaacgtttttttattaaacaaagtagcatctttcgttataataacaattaataaatgacgattgagaggacaagaaatgaaatctatatacataaccggctacatgggagcagggaaaacaacaattggaaaagcgttaagtaaagaacttcaaatggatgttgtagatactgatcaaaaaatcgaagagaagcaagagaaggcaattcgaaaaatttttgccgaagaaggcgaaatggcttttcgggaatatgaaagcgaaatgttacgtgcgctaccagtccataatgttattattacaactggtgggggaattattgaacgagcggaaaatcgcaagtggatgaaagagaacggaactgtcgtgtatttatattgtgatccgcatgtaattgcagaaaggcttcgtgaagatacgacacgtccactatttcaaaagaaagatatagatgcattcgtaaagaaatttgaatcacgccgagcttattatgaagaggctcatattcatatcgatacgacaaataagtctgtaaagcaaattatgaatgaattaaaggaaaagattaatgtataaaaaagtggacatactaatcaagtagaggtgatgataatatgtctactaatgattatgttcgctttgtgacgcagcagtttgtgtcgtatatggatgctccaaaagaagatcgaaaacaaaagaaagaacaacgccgtgctgaaaaagagccatttatgaataagtggtttggtgttatgccgctgagtgctgctttgttttaccgaaatgtaaaaagtaaaagaaaaaaatcaagttaaattttagtcatatgtttaacaaaccaaaaatcccctagtgtcgtattacactaggggatttttatttactgcacggattcttgttcttccgtaacggcatgtattttattatttacccaaacaaatccaattccgatacaaatggaaatgccccatccaacagcggtcataatcgctctcatttcaccatagccatctacaccgaaaacagagatgaaataaatttttaagaagctttttaatatgaattgtagaccgaaaaatagcgttaaatattgtagtgctggataaatacgactatcacgataaagctcacgacttttatcacggtcatggccttgcagtgcggcaatatccgcagcgaaatataacataagtggtttctttataaaaattgtacatatgacgataataccgagtacgatgtgataatatgcatcattccacaacattcgttcagctgacccagataataaatctaccgttgtattagaaatgagtgtaattaaaataaagaaccctgtcacgttaaactgtttttcttttttaaaggtatacagtgtataaataatccccggaacagaggaaagtaacatcgcgtaataaggatcgatataaggttttgcaaatttccaaatgaggaatgggattacgagataaaagacaagatctaatatagcttttttattttgattcatacaaagcctccttaagtcatacatatattttataatataatttctgaaaattgtataaggtttaatgggaaaagaaaaaatatatcaattttcgaggggagagtagattgaaaaaaattgcccctagcgtagtaagtttttttagtatataataaaggaaacgctttcatttttaatttgttcacaaaatggacggaaaatcacatatttactatcgatatgttgctttataatgaaactaattaaatatacatgcatacaatattgtgaaataaataacataaataatctatataaatgtaaacgttatcaaaatagagaggtggagacaatgagtaaatttttcttcaatcataatccagcaacagtagaggatggaaggcttgttaaatatgctgaaattatttatggagaaggtggccgttctgtattagaaaatttaatggtgaaggcatctatcagattgcgtgatcgttatccgaataaatctgacgagcagatctcgaacctagtaaataaaggcatccatgatatgtttcaaaaatatgtgagcgagtaagagtggccaatggctgctcttatttttttgtataaggattgtaactctagctgaaaataaacatgtattctgaaaaacgtaaaaaggagtgggaaagatgagcaatggaattggacgttcgaaagaaaatcttccaactgatgcaaatcatgtgagcgcgaaggatcgtgcgtatcaaaaacgcatggcaaagcaaaaacaacaagagcgtaatgaggatagagaataactcgaaataaagctccttctaaagcagaaggagctttatttcgatagaaaatgattcgcggtaacataaaagagtccaccgttaataatttgcactgtaatacgtggttcatactgttcttgcagagcttgtttttcaatttcatagctctcaggaagttcgtcactttcttcataaaaacggtttaaaaggtctaaatcatgattccaacgcactcttgcttcttttgcccacgtatggtcatcttctgcaattatattttttaaagcgtcttctatgcgttgtaaaccactttgaggtttaatgatgggcgagagcgtaaaacaaaaatcaggtatttttggtgtaagtttaatgtttgttaatgtttcatgaaagtttgccatcattgttccagaaatgagatgaataccaatcgagtgaaggatgtctttttttcgatcacattgataggaaacttttatattaataccgagccaagggtggagcggtgtatgtgttgacccattatgtcttacatcctcatataaacgtatgtatgagcctaattcttttgtcgtttggaaaatttgatgtagacgtggtgaaccgtagtgaataagctcaccatcattttcttcattttctggatttgtaataagagtaaggcgcatcggattcggtacgcctcctgttttctcaagatagtgccaataaaaagggcgattcattaataatttatccatctcaattgttaactgtacatctaataaatgaggagaacgttctaaaatttcacagttattcgcctcaaagaaattgtataagtaattatgaatttcatgttgctgcatagccttgcacctcagcttcatttcgtttcgcaaagtcgataatagatgttaagttttccatcttaattctaatttcaccttcgctctttgattgcgcgaaaatttcttgaatgtgcgcgtcgatgtttttcatattaattctcgttaaaatttcatcgagttcaccaataacacgctcgaataagttgattttttcatataacagtttcagaatatgttcttcaacagtatgctttgtagctaagttataaatatgaacatcatttttttgaccgagacggtgaatacgtccgattctttgctcaagacgcattggattccatggcaaatcataattgatcatatggctacaaaactgtaagttaatcccttcaccaccagcttcagttgcaattaatacttgtgcgtggttttggaaaagctccttcatccaatctttcttcccgcgtttaaacccgccgcggaatggaacggaagaaataccgtgttgttgtaaaaaccattgtaagtacatttgtgacgctcgatattctgtgaagataacgactttatcgtcaatttcttttataagctcaagagctttatttgcttttgagttgaaaggaatatgattaattttgtccattagcacatcgatatgtggatcttttatataatgttcgttttctttctgttttttttctacatgctttttcaatgaatagtaaacagcctcacgactactacacgcttcccgttttaaagttaacgatgagaaagcagatgtgaaggcgtcttgtcctcgccaattttcgatatcattatatagagcttgttcttgttcattaaactcaacaaaaattgtacgtacatgtctcttcggccaatcgataccggtattatgtcgtctatttcgcaccattactttattaatgagagcttttaagtcttcatctgattcggctgagcgatttttggaagcgtaatattcttcaaagttggattgattgcctaaatgtcctggttttaataaagaaacaaggttaaaaatttcatcaatcttattttgaacaggagtagcggttagtaataaacaaaacttcttttttaatcgttgtgcaaattcatagttttttgttttattatttttcagtttatgtgcttcatcgataataataaggtcatattccaagttcaacacgatatcgcgatgtggtgaacgtttcgcagtatcaattgatgatacgattacgtcagcttgttcccatgagtagcttttcttttgtgctacagcgggaatgaaaaactttgtattcagttcgtatgcccattgtgatacgagagaagctgggacaagtataagtacctttttcacaagcccgcggaccatgtattctttcaaaataagtccagcttcgattgtttttccaaggcctacttcatctgctagaatcgctttaccgttcatttgttcaatcacattttgagcgacttctaattgatgcggaagcggtgtgaaatgggataaatgtttcggtgcttgtagtccatcaaaagtaggaacaagtaacgatttttctgtttcataagctaagtgatataaatcccagtttgtccaaggaccatcttcgtcaattctatttaaaaaattgttttgccatgtccgatctacggaaatatcgacattcattacaactctcccaccttttataaactaaagtaattattttttaatgtatgatgatttgccttaaaagaaggcataattatcgttattaaaggctatatgatagacaataataaagtattaaatctcaaaagctgtatttattgtgttttaacataaaaaattctaaattattttttatgctagaatattgatgaaatatagcgaatgatgttaggataatggtgtgaaatgtgtggaatctttcgtattttatccaagaaagtgattttttatttacgctttcataaaaaaatataatgagattccgtatatcctatcttttcagaatgaaaatgtttagaaaagggaagcaacttttattgatttgtcaaagcataagggggagagagcatgattacattacaacgtacaccgttatttgatgtatacgcgaagtatggtggaaaaacaatcgacttcggtggttgggaattaccagttcaattttcaagcattaaagaagaacacgaagctgtacgtacagctgcaggtttgttcgatgtgtctcatatgggagaagttgaagtaaaaggtgtagatagtttagcatttttacaacgtgttgttacaaatgacgtatctaccttaaaggtagggggcgcacaatatacagctatgtgctacgaaaatggtggtacagtagatgatttattaatctacaaacgtggtgaagaagactatttattagtaatcaatgcatcaaatatcgagaaagattacgaatggttagcaagtcatgtaattggcgatgcgacagtagtcaatgtttctagtgaagttgcacagcttgcaattcaaggaccaaaagcagaaggcattttacaaaaagttgtgtcagaagatttgaaagaaattaagttctttaaatttaaaaacgatattcttgtagatggaattccagcacttgtatctcgtacaggttacacaggtgaagatggattcgaaatttactgtaagagtgaagatgctgcaaaactttgggagaaacttcttgaagttggagcagaagagggcttaaaagcatgtggtttaggtgctcgtgatacacttcgattcgaagcaacattaccactttatggacaagaattatcaaaagatattacaccgattgaggctggaattggctttgcggtaaaaacaaataaagaagcagacttctttggaaaagcaacgttaaaagagcaaaaagaaaacggtgcgcctcgtaaattagtcggcatcgaagtaatcgaacgtggaattcctcgtacgcattaccctgtatttattggtgaagaaaaaattggggaagtaacgagtggtacacaatctccaacgttaaagaaaagcattggtttagcactaattgatgtaaaatacgcagcagttgatacagaagtagaaattgaaattcgtaataaacgcgtcaaagcagtagttgttccaacaccattttacaaacgttcaaagtaacggggagaggggtagatttcatgttgcatcgttatcttccaatgacagaagaagacaaaaaagaaatgttacaaacgatcggcgttcaaacgatcgatgaattattctctgatattccagagagtgttcgttttaaaggggatttaaaaattaaagaagcaaaatcagagccagagcttttaaaagagctatctcaaatggctagtaaaaatgctaacttaaaagaatacgcttctttcttaggagcaggcgtatacgatcattatgctccagtaattgtagatcatgttatttctcgctcagaattttatacagcttacacaccataccaaccggaaatttcacaaggggaattacaagcaatctttgaattccaaacaatgatttgtgaattaacaggaatggatgtagcaaactcttctatgtatgacggggggacagctttagctgaagcggcaatgttagcagctggccatactcgcaaaaagaaaattcttgtatctagcgcggttcatccagaatcaagagcagtacttgaaacgtatgcaaaaggtcaaaatcttgaagttgttgaaattaatcataaagatggtgtaacagatttagacgtattacaaagtgaagtagatgatacagttgcttgtgtaatcgttcaatatccaaacttcttcggacaagttgaaaaattagctgatattgaaaaaatcgttcatcaacaaaaatcattatttatcgtttcttcaaatccattatcattaggcgcattaacaccaccagggaaatttggtgctgatattgtaatcggtgatgcacaaccattcggtattccaacgcagtttggtggaccgcactgtggttactttgcaacaacgaaagcatttatgcgtaaaattccaggacgtcttgttggacaaactgtagattcagatggtaaacgtggatttgtattaacgttacaagcacgtgaacagcatattcgtcgtgataaagcgacatctaacatttgttcaaaccaagcgttaaatgcactagcagcttctgttgcaatgacggcacttggcaaacaaggtgtgaaagaaatggcacgtcaaaacatttctaaagcacaatatgcaaaacgtcaatttgaagcgaaaggcttcacagtaacatttgctggaccattcttcaatgagtttgttgtagattgcaaacgtccagtgaaagaagtaaacgatgcattattacaaaagaatattatcggtggttacgatctaggccgtgattataaagagcatgaaaaccatatgcttgtagcagtaactgagcttcgtacaaaagaggaaattgacacacttgtaaacgaaatgggggctatccaatgaagaaccaagaccaagcacttatctttgaagtgagtaaagaaggacgcataggatatagcttacccaaattagatgtagaagaagtgaaactagaagatgtgtttgagagcgattatattcgagtagaagatgcagagctaccagaagtatctgaacttgatattatgcgccactatacagcactttcaaaccgtaaccacggtgtggattctggattctatccacttggatcttgtacgatgaaatataatccgaaaattaatgagagtgtagctcgtttcgcaggatttgcaaatattcatccgttgcaagatgaaaagacagtacaaggtgcaatggaattaatgtacgacttacaagagcatttaattgaaattacaggtatggatactgttactttacaaccagcagctggtgcacacggagaatggacaggtttaatgttaattcgtgcataccatgaagcgaatggtgactttaaccgtacgaaagtaattgtgcctgactctgctcacggaacgaacccagcatctgcaactgtagctggttttgaaacaattacagtaaaatcaaatgaaaatggccttgttgacttagaagacttaaaacgtgttgtaaacgaagaaacagcagcacttatgttaacaaatcctaatacattaggtctattcgaagaaaatattttagaaatggcagaaatcgtccataatgcaggcggtaaattatactatgatggtgcaaacttaaatgcggtattaagccaagcacgcccaggagatatgggatttgacgttgtgcatttaaaccttcataaaacatttacaggtcctcacggcggtggtggcccaggttctggtccagtaggtgtgaaagctgatttaattccgtacttaccaaaaccgattttagagaaaaccgaaaatggttatcacttcaactacgaccgtccagaagcaattggtcgtgtgaaaccattctatggtaacttcggaattaacgttcgtgcatacacgtatattcgctctatgggtccagatggattgcgtgcagtaactgagtatgctgtattaaatgcgaactatatgatgagaagattagcgccattctacgatcttccattcgatagacattgtaaacatgaatttgtattatcaggtcgtcgtcaaaagaaacttggtgtacgtacattagatattgcaaaacgtctgcttgatttcggttatcatccaccaacaatttacttcccattaaatgtggaagaatgtattatgattgagccgacagaaacagaatcaaaagaaacattagatggtttcattgataagatgattcaaatcgctaaagaagtagaagaaaatccagaagttgtacaagaagcaccgcatacgacagtcattaaacgtttagacgaaacgatggctgcacgtaaaccagttttacgttatgcgaagccagctcctgtacaagtttgattaaaataacaaaagaagaactcgctgaggcgggttctttttttgtatggataatttgtcccgcattaacggacagtaaactctcaacttaaaacttagctgctgcaaagaagacaggtgggagataaactgtccgtaaatgcccgattggttcaactaataatcagtggggatgaacaaaaatccccactgattaaagtttcactttatgcagaaatagtgaagaaaatgttaaaaaaatatgttttttgtttcctaatggtgtaaaggtgtagttttataggtagttttgttgaaaaagtcggtttgataaaagtatttatttttgttagaattttattgaaattaagaagatgtgatgaggcaaagattactcatttttatgtatatgtgaaaaaacgaacaagacgggggtgaaagtgtgggatatcgatgttatagaatggtataccatttagaaaatggagaaacaattaaagatgtaaaagaattttgctatcgagaccaaggaaaagtgttagaaagagtagcaaatcgtgtaatggataatagagaagtgacggcgattgataaacaaggaacaatcatttcaatagcatgtgaggacattgtaaaggtggaacttgattacataacagaaagttaaccttgagtcatatcgaattattcgataaaataaactgttgaatggtgaagtgagaagagaggagtttatcatgggtagtacaagacacttttatatgtttatcttagcgtttgttcttgttgtggcattaacgatttacttaatcgttgacagcagctggtacaacacagttcatccggcattccttctgtttatgtatataggaattgcagtagtaagtttcggaatgagagacgagatgttagatcgctttgaaaagtgatacatatacgaaagaccaacaggaaaatgttggtctttttttcttgccaaaaataggatggtgtgtatatactgtatatataaggtatacacagtatatacacaaactggaggaaaacatgaatattattatttcgaattcttcccaagaccctatttatgtgcaaataagaaaacaattaagccagcttattttaaatggcggtttaaagggtggagatcaattaccgtctattcgtagcttagcgaaggaattacaaattagtgtcattacaacgaagcgtgcatacgaggagcttgaaaaagaaggatatatagaaactgttgctgggaaggggacttatgtttcacgtaaaaataatgaactattaaaagaacaaaggcttcgcctattggaaagtaaagcggaagagattgtgaatgaaagtaaagcgttgcagctttcacttgaagaattacagcagatgattgcgtttttatataagggggaatgagagagatgttagagttaaaaaacgtttgtaaaagttatgaaggtttcgcagtgaaaaatataagttttacgttaccacgcggatatattatggggtttgtcggaccgaatggggccgggaaaagtacgacgatcaaaatgattatgaatttaattaaaaaagataacggagatataaaaatttttggcaaggacaataagaaagctgaaaaggaaataaaacaaaatatcggctttgtatatgatgaaaatcattattacgaagatttaacgtgtgaacaaatgaagcgtattattgcaccgttatataaaaagtgggacgaagagcagtatcaatcgtatatgcatagattacaagttccaaagtataaaaaaattaaagaattatcaaaaggaatgaaaatgaaatttgcgattgcaatcgcactttcgcaccacgcagagtttattattatggacgaaccgacagcagggttagatccagttgttcgaagtgaattacttgatatgttgcaagaaattgtaatggaagatgaagtatccgtattattctcaacgcacattacaacagatttagagcgcattgcagattatgttacgttcatcaatgatggagaaattatatttactggtgaaaaagaagacttaatggagaactacgtaatcgtaaaaggaagtaatgatttattagaccgagaaggaaaagaactatttgttggattacgaaaaaataagtttggttttgaaggtttagcgaaggataaacaaggaattatcgattggtttggaaatgaggttgtactagaaaaggctacattagatgacattatcgtttacactgcgaaagggagaggtgtctatgcgtcagctaatctataaagatttgttcttttttcgggttatgtggttagtgtattttattatgcctcttgttttctttggattagatccagatggtgaattgttatttccaatgagttgcttactcataacgatatcatcttctatgatactaatagcgatggatgaaaaaaataaaagtgatgttattataaatagtttacctgttggacgaaaggatatcattattgctagatatatttcgggtgtaatatttattgtaggtggcatgatttctactacgctagttgtttttcttataagaggtatcgctgtcattggtgatattggagcttatcatcccaatttgtatattgaaattccttggtatgtagtagtcagaggtgctgtatattctttagtttatattacagcattattcccgagttattatgggacaaaatcaaaagtagtacgtggaatatttacaggtggagccgctggaataggtgttattgttggaatgtttattggtgacggagaaagtgctacggcatcattcattgattggattatgaatccattacattttggcatatttatagttggattaatcacactagctagtgtctatatcgtttctatgcttcttacaattaaaatttatgaaacgcgtgatttatagagaggagaattcatatgcaacagttgattttgaaggagttttttttacagaagaagatgtttcctttctattttttaatccctattttatctatttttaagaattccgtcgaaccaatggggattgcaataggagtatttataacatgtagtacgattatatatatttctttttattatgacgagaaaagtaaagcagaaaaagtattagtgagtttgcctataacgagaaaagagataattatagctaaatatatttcaagcacattatttattatggctggtttgagtgtaacttttatagtcgtaatattaggaaatattttattgaacagagatatagttatgcctggatatgcaatattttcagcaatagtagcaactttgatttattgtgcagtaacgataccgactaattacattgggggatataaagttattactgtcttgaatttgattatgctttttcctttaatgggtatgattggtcttatgtgcaatatttttggtgataaaacaattatgttaaaagtacttcactctcaagaggctacacaagcaatgggtgttcttggtgtcggagtattagtgagtatattcgtatcattgttcctctcaatgaaaatgtttcaggaggcagagttatagaagggacattttcatattaggaggtgtaatacatgatcaagcaactaattttaaaagatttcatcattcaatggaaatttttaatttggtacatactgtatcctgttttcttttatatggccttaacagatacggaaaatttattcatcattatgtcagtaattattacaattggggcaacagtaaaaacatttgaagcagatagtaaaaatgagagtgaagttatagtaaatagtttaccaatattgagaaaacaaattgtgtatgcgaaatatatagtagcaattattattctttttataagtgtaacggtcagctgtttcacgatgggaatgaagaatgggattaacctatttgaatttattgaaacgacattgcttgctagtattagctttattttagtgtatttaagctttgttctaccaatatctttttggttaggatataaaaaaactattcttattacaatagtaatattcatggcgccgattgttattttagaaactttgtttcaaatcaacttggaacaaattcaattatataataccttgttattcattggttcaatatgtatgctcatagcatctatcttcgtttcagtgaaattgtatgagaagagagaattttaaaaggtgccctataaaaggcaccttcttcaataacgacaatacgagagcagtagtttataaaaagaaacgctatttggcacatctttcggagtatgtaatataaagctgaaaacgatgatgagaataagaaataggaaaaataaaaataggatttgcttatgtatagaattttgcatattatccactcctttttttgggtagtatgtccaaaagaaaggaatgtatgaaaaaaattggagggggaacaatggggaaacgaaaattgttatttgaaataggagtattatttttgtcaataggtcttttgttatcaaatttttattcagacataccatcaccgtttcctaatttgcataaaggaattggtataagtattgttataattggtctgttttgtcttatcacatctaacttctacagaaagtctgaatgaatataaaaaaggacagttactctttttcagaagtactgtcctttttaaataacttattccatagtttggcgatactccatataatgacgattgcaatggaggcgataatggaccaaacaatcgatataatttcaagtgtcatgttaggaaggaatgtgagaatggataatactttatgaaacaatgattctattatatgaaaacttatttgtaatagaatgacgatacaaagtgtgatccatgctaatattttctttccttgttctttccacatgacattcacctcacgttagcttaatagttttaagccaacagcgccgcataaaatgcagcttaagaaagcaagacgacgccaatccgctgattctcggaaaatgagaatgcctagaagtgcacttccagcagttccgattccagtccaaattgcgtaagcagttcccatcggtaatgtgttcatcgcaagagataagaagaagaagcttacgccgaagttagcgattaaaataacttttggtgcccagcctttcttttcagtggctactttcataaagagtacaccaataatttcacaaataccagctagaattaaaaatacccaagccattttatgcggcctccttcgcttctttttcttctgttactcgttttaaaccaattactccgaagaagattaaaccgattaataaaacttttacgatagagaaaggttctccgaagatgaaaatctctgtaagaacgattccaccagctccgattcctgtaaagactgcgtatacagtgccgacaggtaaatctttataagctctaaataataagacgaaactaattgtaattaatagagcaacaccagcccattcaagtggtgcctctgctttttttagtccaatcacccaaaagatttcaataataccagcgatgattacataaatccatgccatatgtcatttctccttcctaccagtcgttaggtaaagggcttaaaaacgacgcattgcaaagggcaatccgtcagtttgaaagtccgcgccaaaatactttccaagaagcgtctaaacgtgtctcaaaacgatttaaacctgcgtataatagttcaaccataagaccgtcgagtaagcatagaaaagcctctaaggcgtcttttacttcaatgttatgcagctcatcttgttcgcttgctcttttaaatacagggaataaaagttttccgacgttttcaatgtgtacatttgctttattaataatttgttcgcgaaatgcatcaggcggaaaataagaagttcgtaaccaaaacattgattcttcactttcaccaaatcgttttgcatacccttttaataattttaaaagcaattcttcagtggacgaattggaaaagctttcgatatcgcctgtgaagctctgcaaatctttttgaagagcagattctaagcatatgaaatatagctcttcttttcctttaaagtgtgcgtaaatcgatggttttttaatcccaacttcttgagcaatatttgccaatgaagttccttcatagccgtagcgtgcgaaatgagaaagtgctacagctttaatgcggtttgctgtcattttcatcccctacctaccgttcgttaggttaattatatgagatgaaaaatataatgtcaataggtgaagagttgaaaaagagcgttataggtaacgctctttttagacagtctctcgctcaattaaatggaatgaaagttcttttgcactgccgacaatttgctcgctttggatctgcttatggaataaagaaaaagcatgtgagcccattgcgagaccgggatgttcaattgtggaaatttctaatgcctttgaaatttcatgattatcaaatccaaggatagcaaggtcttcaggtactcgaataccatgttttcgagcctctgttaataaaccagctgcaacttgatcgttcgctgtgaaaatagcagttggacgatttttcatatttaaaatatgatggagtatttgtgctccgtcctgcattgtatagcattggtggaaaatccattcaggatgcaacgttttcccttcgttacgaagtgtatcggcgaacgctttttcgcgctccatggaatttacacttgtttttcttgctaaacaaattccgattttttcatggcctctacttagtaaataggcagtaccgagacggaaaccttcataatgatctacgtagatggatgaaatgaggggatgcttcattttttcacatgaaataataggggcaaattttgcaaaaggttcgatttgttcccaagagctcgttcgggagcaaataatcatcccatcaaattgtttcattttcatcatttcaagaacacgaatttcttcaatgctatcgtaattcgtttgacataaattaatgtgatatccggcagctaacgcttcgtttccgattccttcaataatcgtactgaagtaggggaggttaatgaaaggaagcataacgccaattgtatatgttttccctcttattaaatggacagcatttatattttttgcgtagtttaattcttcaacagcatctagaacacgcttacgcttttcttcttttacgtaagggtgattattcaggacacgagaaacagttgatatcgatacaccagcagttttagcaatttgttttatattggccatatgtatcacctctttcccttattataaagggaaaataataagaaagaaaaaatcttgacctgaaaagcttttcacaaactatggtattaataagacttctttttattcgcgtaaccttttcacttgggcgtaagaatgataggggtcttttttgtttgcaaaaagtgttgtcaaaatgtgtgagaataacgtggaaagttttcaaaggtggagtttggtgacaaagcgaatatgaagagaatatcaacgcttcgttcgttaagagagcggtatgaaagggcggaaacaaattgaaaaaaagaatcatttgtttcgtgttttctagtttcatgcttagttcgtgttcgtttcagcaaacgatgcaagaagaaaaacactttgtgggaacaacaggaggagctatggatcgtgttacggatcctattccgctaaaggaacttccaaaatattttccggtgaagtttaaagttccaacgtttttaccgtacgacattacaagtgatgtgaagggggaagtaagaacgcttgggaaaaagaacattgtcttaacgattaaatataaacagaaggagtcaggtagaaatgagtatattgagttaaatgtcgcgaactttccttatagttttccggatcttgtggaagagaagcgatttcaagaacaaatgaaactgaataatggaacgtctgcttattttaaaaataaagatgattatgaacgtggtgacgaatttgctacgcttatatggaaagagaaaggaattgaatatcaactgctgtatcggaatgtagaagagaacgatgaaaaggtaatcaagcagaatttattatacattgcgaataagatgaaatgaaaaaactagctgatttattcagctagttttttgtatgttattatttctttttaattttgcctgtccaagatttaaatccaccttgtaattggtagaaatctttgtagccttgtttttttaagtattgcgctgcacgacctgtacggaatccgctttggcaatataagtaaacaggttgatcttgacgaagttctttatggcgaaggcgaatttgtgataacggaatgttacgtgcacctaaaatatgccctgcgttatattcgtctgcttcacgaatatcgataagctgtgctttacggtaaccagcgcgaaattcttcttctgtaagagttttaattaattttttctgatagaagtacatccatacagtgtagccgataaatgctacgattacggctaataaaataatccaagttgttgacacgattctatcgctcccttttttcttatcctactttcaatattataatgcccttatgtatttatgcaacagattcatttgcatataagaagaaatttcgtattctttcacaaattttgtcgaatttggtagactagagaatgtgaaaaataattggttatatgaggtgcaggatgggaaaagaaaaatggtgttatattaactctggtcaatgttcaccggcatttaatatggcgttagatgaatgtttattaaattggcaaagtgaaaagaaaatgccaccaacaattcgtttttatgaatgggaagtaccaacattaacagttgggtattttcaacgtgttgaaaaagatattaatatggatgtagttaacgaaaagaaatatggattcgttcgtcgtcaaacaggcggcaggggtgtactacatgacaaagagttaacgtatagtgttattgtgtctgaagatcatccgaatatgccgaaaacagttacagaagcgtatcgtgttatttcgcaaggtttattagatggttttaaggcattagggttagaagcatattatgcagttccaaaaacagaagcagatcgtgaaaatttaaaaaatccacgttcaggcgtatgttttgatgcaccatcttggtatgaaattgtagtggaaggacgaaaaattgctggtagtgctcaaacacgtcaaaaaggtgttattttacagcatggatcgattccattagaaattgatttagatgaactatatgatctatttttattcccaaatgaacgtgttaaggaacgtatgaagagtatgttctcttctaaagcagtagcaattaatgaattaacagaccgtacatttacgatagaacagttaattaaagcgtttgaagttggctttgaaaaaggattggatgtagaacttgttccatatgaattaacagaagaacagttacatgaagttcaaacgttagcgaaagaaaagtatgaaagtaatgagtggaattataaaaaataagaggtggcgatagccacctcttatttttttatagtaaattaagtactttttctactttgattcctttatcttgtaaagaacgaaggcgacttacaacgtccataatttctttgtcaaatgtaacgctaataccttggctttgtagttcttcttttaagctttcaatagaatcatctatgtcgatgccaagctcgtaatcttgacaaacttcaattgtctttttcacgagtttaacataattttcttgtagttttgaatttgtttcagtcaaagcaggctgcttcggttttgcaggagcaaccggtgctgtctcttgctttgtaactggagtagggactgctttttttacaggcgctggagtaactagttctacagctgcttctacgcttactggcttcggtgtcggtaccggagtaggcttaggtgccatagcaggtgtttccacacgcgtaacaggcttaggagcaggcgtaattgcttttggagcttctacaactacttcttttttcggtgctgcttctacctgtgtttcttcttgctcggcagcttctttattttctttactccacataacgcgttcaatttctagagaaacattgtttttgttcatcgctgttaatgtaactttaccaacttcagcgtttccagtgaaatcaacaattttataaataacactcttgttccaatccacgtttccgctcaaaaataattcttcgttacatttcggcgttaagccctcgattttaatttctgcgtttacaccgttttcactatataccataattagcgaagcatttacatcttcgtctgctaacattagttcacgtaccattttgccggtgcgtacttgcgttttcttcttaactgacatctaatttctcctctcaaaaattcagtaataataaaaaaatcgtataacgaaaaataattgctcacgaagatttatgataccgataataaaagcatcacgtcaacaattaactttaattattttgcatttttcttattttctttatgaaatttttcaatttgtaaaattagacagaagaaaaaacagccttttgaagggctgttaaaatttagatgttttatataaaaatttgtacaaaatataaaaagaaagtgtaataagagcaccttgcaaaatagacaagttataaaataagtatggttttgttttgaaaaatacgtttgcaaaaactgataagacaaaaggtataaataccgataataagagaagtgctttttgtttccaggaaactaatattgtaaaagagaaacgtctaaataaagaaaaagttatgaaagcaccaattgttaaaacaatagcagataatattgttccgggaatactaaatggaattcctgaagtgtttgtatttgaaaatagtttttgcataagagtagtgaatgtatcgtatccaatttgaacagctaataataaactaactgcaaacccaataacggcagcttgttggaaagaattttgatgttccgaagagttaattaattcatcgcagtaagcttttaaatcctctccgaaaatatcatgcgcagttttaccgtcttcttgcgcttctaaaagatgatccaatatttctaaaagtaattcttccatttgtttttgtggaacgctagtaaggcgtaaataaataagcatatcaccataagcagcttcgttttcaggtgttaataactttctttttttattgtttaactgaaccatttctttttcagtcatgacctcgtcactcctttttaaagtccaagtattcttttttgaagaaaagtttatatagtacatagcaagagatggcaagcaaagtaccggtccaaggtgaaacttgtaatgtagtatagggattttttataaataaaaaggaaataccgattaatagcatccataggctatgacgtattaaaaagcttcctatatgcctccaaatagttgttttatttttaaataaatcagtgttaataaaatcgaagacaaaacgtatcataagatgtacggataatgtaaatacaagcagataaatgaaatcaatgtgtacaaatttaaaacgtgctttatctgcaaataagggtaatacaaatgcaattacggacgaaatagcaaagtatattgctagcaggtaacaagttataaataaaggaattgataattgttcccataaactttgcttcggtagggcggcaattaactcgtcacagtacgcctgtaagtcgtctccaaaaatatcataagcatttttttcttcttgctgggcttcaataaggtgatctagaatttcaattagcagttcttctgcgtggtattctggcactttagctaagcggatgtatattaacatgtcactataggcgatttcattttctgtagttaataatttacgcttttggttatttaattcgattaaatctttcgccttcatccccatcactctccttgtaataaattgtttacggtcgttgaaaccatcccccagctttgtttaaattcttcaagctgttctaatcctttatcggttacgtgataatattttcgcttcggaccgagtgaggaagcttttaatgtgccttcgatcaatttttctttttgcatacgtaataataacggatagatgcttccttcgcttacgaatgtaaagccatgtttatttaattttgtgctcagttcatatccgtacacttcttcttgtgaaatgatgtataggatgcaaccttctagtacaccttttaacatttggctgtgcatgatttcaccaccttttactcaggtaacttgcgttgcaaggtagctgttatccaaattataacccccagtaacttgcaacgcaagttactggggggaaaactttaatgtcccccatactaacgagagggcgaaaagcatatgagaccatttatgccaaagctcgtttactttgaacgaaaggcacttgaatatccacttgattttatagttgcgccaatttaaatgcatgaagaatgggaagaaggaaccgtaaactatttgagcgacaaagatatgacaataccaaatttaacgtttgaattgattcagcatcgttttccaaaaccatcggaaaatatgtatataaaaaggatgatgcagcagtattggaagaaacgataagaggttatataaatgagttttttcctaatgcagaaatacaatattttacttaagggcggtctgtatgcaaatacagattcttttttgttttatatatttaggctcgttttcaacttgtcacgttattctttctggtgtatcattttattgattgcttcgtacggaataagcaaaatgaacttggatggaggaaaccgatgcctacccctagtatggaagattatattgaacaaatttatttgttgattgatgaaaagggttacgcccgcgtatctgatattgctgaatcgcttagtgtacatccatcctctgtaacaaaaatggtgcaaaaattagacaaagatgaatatctaatttatgaaaaatatagagggcttgtattaacaacaaaaggtaaaaaaatcggagaacgtctcgtatatcgtcatgacttgctagagcaatttatgcgtattatcggtgtggatgaaagtaaaatttacaatgatgtagaaggaattgaacatcatttaagttgggaagcaattgatcgcattggtgatttagtggaatactttgaacaagatgcagtccgagtggaaacacttcgtggtgttcaaagagcaaatgaagagaaaagtaattaaggggaacgtatggcgtttccttttttatttcaattcgaaaaggatgggagaattatgaaagcaattatttttgattttgatggattaattgtggacacagaaacgatatggtttcactctttcagagatgctgttcgtgaatacggcggggaactacctttagaggaatttgcgaaatgtattggaacaacagatgaggtactttatacatatttaaatgatcaattaaaagagaagtttaacaaaaatgcattaaaagaaaaagtggcaactttacataaagagaaaatgagaataccagaagctcgtgacggggtaaaagaatatttagaagaagcgaaagaaatgggattgaaaatcgcactggcttctagttcgtctagagaatgggttattcattttttagaagagctacagattcgagaatattttgaagtgattaaaacgagagaagatgttgagaaggtaaaaccagatccagctctttatcgagttgcaatagaagaattaggaattaagccgtctgaagctgttgtatttgaagattcattaaatggattgagagcagcagttgcagcgggattaacgtgcgttgttgtacctaatgatgtgacacggaatttaccatttgaaaatcatcatcttcgaattgaaagtatgagagagaaaagtttaaaagaagtgcttcaaagtataaaaaaagaccgtatttcctaaaaggaagcacggtctttctttttgctttttttgccttcaatgacagttaaatgagactgttttctttttcgtttcaaagtggaagaattcccttttttacttttgtcattagaagtatttgacttaaagaaagaattgcctaggggtgctacattttgtttcccatgtttgcggttcgattgttttgccgcacgcttatatgagctttgtgaatttgcagaaccactggaatttgtaaacatcttgtatagcaagtaaaagataccaacaacaagtaacatgtacccgatatttcttaatacacccatgggatttgtaataacagatgaaacaaggccgaatattgccaatccgataataagcacaaatatagcgaaagtaaacgaacgaccgttcataagggacacctcctaaaaacgtatattaaaattagtatattaacgatgaggaaaggagttgaacaccatttttaaataattattgtttgttctctaaacgtaataattcttcaaacgatgcaattgctacttccacttgatcatctgttggttctttcgttgttaatagttgtagccataatccaggatatccaagtacgcgtaatacgggaatatctcgtaatcgatttgtgaattgtagtacttcaaaagaaataccaagtacaactggaattaataaaattcggtttataactcgtgcccaaagaggatctgtagggactaggaaataaacgaacattccaataatgactgtaaatataataaagctactgccacatctataatggagacgagtttgcttttgaacgttttctacagtcagaggaaggttattctcgtaagcattgattaccttatgctctgcaccgtgatactgaaatacccgcttaataagtggggttaaagaaataaagtatatatagctcaataatagcatgagcttaatgacactttcgacaatgatttgcccagtatgagacgggaaaatcggtcttgttaattcagctaatagtgcaggaactgctgtgaaaatgactttaccgaatataaaagataaaacgccaacagctgcaactcctaataccatcgttaattttgattgttcttcttttttatttgcaatttgttcatcatcttctgggtggacgtcaaatcgttctgaagcgaagtttaaatgctttgctccattcgcacttgcatccacaatagcggcaatccctcgtaaaaatggaattttttttagggtagatagtactttattacgaacgcgtggtaatcgataaaattcaatcgatttatctttacgacgaaccgctgtaacagtatattctctaccgccaaacataactccttctatgaccgcttgcccgccatatatttgttttgactcttctgccatgttaacaccaacctgtatttgtttctctcttatgtagaaaaagaggcaattgtcatactgggttctgtcgttttgaaataagacaatcaccgagtttcctttattttatcggcaaatacaagtagatgacaagggaaaatgttatgagagtcggacatttcttattctttttatagacaaatttcgcaggatttaaacatgcttcaaaatagtttcgggcatactattgagcggaggtgtcgatgtgagtcaagaacaattaggaacaaggaattttgtgcagattggtttgtttggtggaatcttttggggcggggtatggtatttccttcatatattttcattcacggaggcgggcccgaattatttccttttaccatttgcgtttggaagttggaaagagggtgtatggggcaatgtgttcggaatagtgtgtatgggacttctttcaattttgattgcctttttgtataaagcattttttgcaaagtttgaagggattatagcgggaattatttatgggctattttggtgggcactactgtttttggggatgggtttaatggctcctgttattaaaagtgcgctccatttaccaaaagagacaattgtgacgacaatatgtatttttatattgtatggtgtgtttatagcatattctgtttcttacgcagtaaatagcaataaagcagaacaagaagggtaagagaagacgaactattcaaataagtaactcctatgttaaaatattgtatagatatttaatattaaggagttttaagaatatgaaaaagttactcctcgtaaacggtcctaacctaaatcgcctcggtgttcgtgaggtaaatgtatatggaaagggcacgctaacgacacttgaagcagatatgaagcaagaagcagaaacaatgggagtggagttagaatgtttccaatcgaatcatgaaggtgccattatcgacattattcatgaagcggaagatatatatgaagggatcattttaaatccgggagcatttacgcattatagctatgcgattcgtgatgccattgcgagcatttcgattcctgttattgaagtacatatttctaacattcatcagcgtgaatcgttccgtcatgaatctgtgacggcagctgtttgtgcaggtcaaattgtaggatttggtttttatggctataagttagcgttatttgcattaatggagaaattgagggaggcataaagtaatggagaaaattgaaagattacgaagtgcatttgatgaggctggtattgacggtattttgttaacaaatgaacatagtcgtagatatatggctaacttcacaggaacagcaggcgttgttcttatttcaaaagatcgtgctcaatttattacagatttccgttacgtcgagcaggcaagtaaacaagcggttggatatgaggttgtacagcacgcaggattgatcattgatgaagtggcaaagcaagtgaaagagcttggaattcaaaagcttggttttgagcaagatactcttacatatagttcttattcagtgcataaggaagcgattgatgctgaatttatcccgacttctggacttgtagaaaagttacgcttgataaagactgattcagagattaagatattaaaggaagctgcacagattgcagatgctgcctttgagcatattctatcattcattcgcccgggagtatctgaaattgaagtgtcaaatgaacttgaatttttcatgagaaaacaaggagcaacatcttcttcgtttgatattatcgttgcttcaggtcttcgttcggcattaccgcacggcgtggcatctgaaaaagtgatagaaacaggagatttcgttacattagacttcggcgcttattacaaaggatattgctctgatattactcgtacgattgcagtcggtgaaccatctgataaattaaaagaaatttataatatcgttttagaagcacaactacgtggtgtgaacggtattaaagctggtttaacaggtcgcgaggctgatgcgctaacgcgtgactacataacggaaaaaggatatggtgaatactttggacactctactggtcatggaataggtcttgaaatccatgaagcaccaggtttagcgttccgttctcatacagtacttgaaccaggtatggctgtaacagtagaaccaggtatatatattccaggtattggcggcgtacgtattgaagatgatatcattgtgacaagtgaaggtaatgaagtaattacgaaatcaccaaaagaacttattattttgtaatacacaggaggatttttttacatgatttcagtaaacgattttcgtacaggtttaacaatttcagtggacaatgccctttggcaagtacttgatttccaacacgtaaagccaggtaaaggtgctgcattcgttcgttctaaactacgtaatcttcgcacaggttctgttcaagagaaaacattccgtgcaggtgagaaagtagaaaaagcacacatcgaaaaccgtcgtatgcaatacttatacgcaagcggtgaggctcacgtatttatggataacggaacttatgagcaaatcgaacttggtgaaaaacaaatcgagcgcgagcttaaattcctaaaagaaaacatggaagtagcaatcatgacttaccaaggcgaagtacttggtgttgaacttccaaacacagttgaattacaagttacagaaacagagcctggtattaaaggtgatactgcttctaacgtaacaaaaccagctacattagaaactggtcttgttgtacaagtaccaatcttcattaacgaaggcgaaatgcttatcatcaacactggtgaaggtaaatacgtttctcgtgcatagtaaaaaagcactcgtgataattcacgagtgctttttttataggaaatagggtagatagtaaatagctgttattataaaactgactaaaacaagtgaaagagtacccataatagatggagtcaaaacaatttgaaatggttttatttcgccagtctcaacgccagttaatgttttacttattgcgtgatctgtaatgttatttctatggttactcataataattaaccacataattgcaaatattgctaaactaccaaggaaaaaggtctctataaatgaccaaccgaccaataatgaaaaaagataaataagagctaattctactacaacggttaaactaactttcaatgccttcatatttttccccctcattctgtaatttcaaccagtttaaaaaattttcacgtgacacgacatgcagagagcaaggtgactttacttctttctctagtgcagcgtgttcgtctggaaacttgttttccacatgcaatgaaatataaggtagtttttcttgtgcttttaaagagcggatattattcgttttagcaccagcaaatacgtaggaaagttgtaagtctaaaaaggcgattttaaagatttcttttttagcagcctcgttatagccttttccccagtacggatagccgagccaactaccaatgtgagattgctttttctcattattaatatgtttaagtgtggtgaggccaattatttcattttcttcattcacaatcattctcgataaggatttcttttgacgctcttcttctattgcgaaaagaagaaatgttttcgtgtcttcgatattttctaccgttatccccaatgcattttttatatgtggatcacttgatagctcgaaaatcacatttgtatagcataaatctagtggtaataaagtgacgtgctgcatggtttaaacctcttttaaactaaatgtaccataatataccatgaaataatatgaatattcagattgtaattcagactttagagaaaaattatgtttttacttctgaaatagacaacctctgcatatggttgtacaaatatattcttttttagaatacgaagttagtaactgttacgggagaaggtggaagaatgaaacagtggctagcggcaatggaaacatccgtgcttgttatgggggcacttcgattattttcaggtagtgcggagatatttgctgctttgcttatgctttatgtgaatgatgcgaagaaagcgttgtttataaatggtatgttggcgtttgttggacctaccgtattaattttaacaatgacaattgggatagcgagtgtagcaagtgaaatttctttcttgaagctcttttttctagcgcttggaatttgctgtatttttatcgcattactgaaatagtaagtcgagtatagtggggagaagccgatgaaagaggtattagaagttttaccaaaaacgatgaagtacttaattgaagaatgtaagcaatacgatgctttagaggaaattcgcgttcgaattggaaggccgctagagtgtattgcacacggaaaggtgtttttttatgactatatcactactgcagaggatgctatttacttattgaataagttaagtcaattctcaatttatacgatggaagaggaattaaaacgtgggtatgtgacgcttcgcggagggcatagaatcgggttagcaggaaaagtcattacagaaaaaagcgcagtgaaaatgattcgtgatgtctcttcctttaatattcgtattgctcgtcaaaaaatagggattgctgaaccgcttttgccatatttgtatgaaaaaaggtggttaaacacgatggtaattggccctccccaaacgggaaaaacgacactcttaagagatgtagcacgttgcatgagtcaaggggtaagtgcttcggaaattccttcctgtaaagtggggatcgttgatgaacggtcagaaattgctggttgtgtgaaagggatcccgcaatatgattttggtacccgagtcgatgtgttagacgcatgtccaaaggcagaaggaatgatgatgatgattcgttctatgagtcctgatattttgatcgtagatgaaattggccgtaaagaagatagtgaagcaattatggaggcagtgcatgcaggtgtccagctttttataagcgcacacggattttcctatgaggatgttgtgagacgtccatcgctcaaggcagtgctagagcttggtatatttgataggtttgtggagttgtcaaaagcgaggggtccaggaacggttatgcaggtgaaagataaatatggaaaaccagtgttatcaaatagaaaggctgagggcgtatggtgaaaatatttggtgcagtgttaatcgttgcggtcagcacctttttcgggttttcgtacgctaaaagatacagtgagagaccgaggcaacttaggttattaaaatcagcacttcaatcattagaggcagaaattatgtatggacacacacctttatctgaggctgccgagcgattagttaaacaaatgccaaagccattaaattggatatttcaaagtttcgctaaaaaactagaaagtggagaacaaacagtaagggaagcttggatagatagtttgaaagagaattggaagttgacggcttttcaacaaaccgagtatgaaatactgcagcaatttggtgaaacgctcgggcaacatgatcgtgaatcacaacaaaaacatattcgcttatgtattacacatttggagagagaagaagaggaagcgaaagctttacaactgcaatacgaaaaaatgattaagagcttaggggtactagcagggctacttattgtaattttactgctataggggggagaaaggcgatgtccattgatgttggattaatatttcaaatcgccggaatcggcattgttttagctttcattcatactgtactaaaagaattgaagcgtgaggatattgcaaattgggttatccttgtcggttttgtcgtcattttatttcatgttgcatttttaattaatacgctattcgacaagattaaaagtgtctttctcttccagtaaaggaggcggttcgaatcgaaattatacaaattgtcggattaggcctcgttgctacgtttttagctgctgttttgaaccagcataaatctagtattacatctttatttattgtgttcgtaggtagcgtgatgtttcttattttaatcgatcaaattcattctattttacaaatgattgagagagtagcgagtgaagcgaaagttagcaacgtctacgtggaaacgttactaaaaattattggaattgcttatattgccgagtttggagctcaaattacaaaagatgctggtcaaggtgccatcgcttcgaaaattgaacttgctgggaaaatcttaattctcgttatggcaattcctattttgacggttgtaattgaaactattctcggatttttaccgacgggataagggggagtgaatgttgaggaggtttggagctaagctgctatttgcttgcttccttttcttttctttaccggttgttgtacaagcttctcctgtagaaacaaacgtcgttgatcaacaattggataagctcggaattgaagatgtgaagcaattttgggacgggcttgttacaaaatatggtggctatttgccagagagtcaaaaagggagttttatggagtttgtaaagggagaaaaagaattctctctaaaagagtggatgatagggttattaaaatatttatttcatgagcttgcagctaatggaaaactgcttggcacactcattatgctcacaatctttagtgcattgttgcaatcactgcaatccgctttttcaaaaagtagtgtaagtaaaattgctgatgctgttgtatatatggtacttattatttttgctttaaatagtttttatgtcgttatgacatatgcaagagaaacgatacaaacaatggtagatttcatattagcgctattgccaattttattggcgcttatagcgactggtggcggggttgtatctgtatctttctttcatccgattatcattttcttaatgaatacaagcgggcttcttatgaattatatcgttctaccgcttttattactggcaacgatattaagtattgtaagtacaatgagtgatcaatataaagttacaaaattgtccaagcttctgcaaaacgttagcgttgggattatcggtatcttcttaacgatttttttaggggtattatctgtacaaggaacagcgacagccgttgctgatggcatagctgtgaaaactgctaaatttgtaacaggaaacttcattccagtagttggaaggatgtttacggaagcggcagatactgttattagcgcatcaggattattgaaaaacacagtcggaattattgggctcgtcattttatgcttaattgttgcttttcctgcgattcaaattttctgtattgcatttatttataaattcgcagcagcagtattacaaccggttggcggcggagcaattattcaatgtttagacattattggaagaagcatcatttacgtatttgcttgcttagctatcgtatcatttatgttctttttaagtattacaattattattgctgcggggaatattacacttatgatgcggtaggaggtgaagagtatgcaatttgttacagagtggatcagaaatattatcgtttttttgctcttagcgacaatgattcatcttattcttccaaattcgaatttgcaaaaatacgttaaatttgttgtaagtcttttgttagtcgtattaattttaacacccctttttaaactattgcagacagatgtaaatgaagtaattgcaaattttaatgaagaaaagtacgtagcagaaggatctgtaaaaaattcaatagattcgaagaaaaaagaaatacaagctctaacacgtgcatatagtttagaagagatggctaccaaaatgaaaaaagaagtaggaaaagagtttgagaaaaagtatggtatggctgtctctgaaatacaaatagtcgcagcagaaaatatagaagaagtaaagtcagcgaaagatattcaatctgttgttgtgacgttgaaagaaaaagaacgtagtaaaaatgatgcaatcgaaacagtaaagccaattgaaattaacacgaaagagcctccaaaaaaagtggaagaaacgaatgtagaaatgaaagatttcttttcaagcaggtggcaactagagggtaaacaaatccaagttcaaatggaagggaggacaggtagagtaaatggacaataaagataaaaattcgaagttctcattttttcgaaacttattgaatggggatcaaaaagaaagcaacgagaagggtaaaaaggtaacacctaagtttttacttgtcctactcatacttggaattttgcttatgttttctagtagtctcttttcaagtaaaaaagaagaagtacctgtatttaaagaacaaaaaactcaaaaccaagaaaaagacgtaccaactttcggacaaaaaagtaatgatagtatgtcaaatgtagaaaaatatgaaaaagcgtatgaacaagaattaaaaactgctttagaagaaatagcaggagtaaaagacgtaacgattaaagtgaatttagattcatctgaagaaaaaattttagaaaaaaatacagtgaaacgctcacaaacaacaggtgaaacagataaaacaggcggtaagagagaagtagaggacgagtctcttgatgaaaagactgtcattatacgtgaaggggataaagaaactcctgttgttttacgaacagagaagccgaaagtacgtggtgttcttgtcgtagcaaagggagtggataatatacaagttaaagcaatggtaaaagaagctgtgataaggctgctagatgtaccggcccatcgcgtttcagtttcaccgaaaaattgatagggaggaaataaagtgttaaaaaaacaaacagtttggttattaacgatgttaagtttagttgttgtactatctgtgtattacgtgacaactcctgacaaaatgaatacagcatcgccagcaacaggtgaaaagattggacaagaaaaacaaggtactgataaagcagtaacaaacgaagcgcctaaagaaactccgaaaaaagaaaatacaagcaaagaaacaacgaataaagaaacagacaaaaaagaaaatgcaaaaaaagaaacaagtaaaaaagagggcaatgtatcagttcaatcaagtgatgagaatttcacagctttacgtatgcaaatggaagatcagcgtagtgaacaaaaagcaaaattacaagaagtgatgagttcaacaaaagcttcagcaacagaaaagaataaagcgaaagaaaattttgatgccattacgacaatggaaacgaagcaagaattacttgagacagtaattaaatctcaaggaggatatccagatgctcttgtaagagctgatggtactgatattagagtaacggttaaagcggcaaaacattcacagaaagaagcaaataaaattattcaacttgtaagaagtgaaggcggatcaaaagatgtaggtgtgaaatttgatccaccagcgaaataagtgaaactttaatccgtagggatttccctacggattattatcttttactaagcaaagggtatgcaaatagtaaaaagagtatgtaagtacgtgtgaatagaaaaaagctatcattttcgatagcttttttctattgcgtctttgtaattatttttactatgttcagctcggaatggagaaacacgttgtgagtaaaagattaatggttcatggtactgatgattactttttccggatttgacgtggatgcaaagaacgcatgcccaaacgattacagcaggtaaaaagagaatgagccatatcatatttccacacctcgacacaatatattttctacactttgaacatactattcttatatgaaggaatgatgaacggtgtgtaaacaaaaaaaaaatatttggtaaaaatatgttattgactataggtgtggtgaagagggaatggcatgtttgctgtgtaacgttttgaaaaagtagtgaatgttttttaagaagtggtcttgccaatttcgtgtgaaacttggtattattactaggtattaaatttttattggaataatatttttacaggagtttcgatttattataaagaaatataaattggaatgtttaaaaaatttatcgtaagatggaaatagtaaatatttctattagttaatgaaatatattttctaatagaatacatcgtatttttacagtcaatctagttttcgtgacgagaatctgtaaaaacgggacaaacaagagtatgggagtggattttacatgtttaaaattcaagaagttcgcgaattaattaaattaattgatagctctaatattgatgaatttgaatacaaaaaagacggtacaacaatcaaaatgaaaaagcgtggtaatgaagttgttgctgtgcaagcacctgcagcaaaacaagctatgcaaccagtagcgcctgttgaagttgaaacgaaagtagcagcagcacaagcagaagcgccaaaacaagaagagaagaaggctgttcaaaatgaaaacctacataaaatcacatcaccgatggtaggtacattctattcttcttcttcttcttcgcctgatacacctccatatgtaagtgttggggatagagtatcgaaagattctatcgtgtgtattgtcgaggctatgaagttatttaacgaaattgatgctgatgtagagggcgaaattgttgaaattcttgttaataacggacagcttgttgagtatggacaaccgctatttcttgtaaaagcgtaataagggagtctttgtgatgataaaaaaagtattaatagccaatcgtggggaaattgctgtacgaattattcgtgcttgtaaagaaatggatattgaaacagttgcaatttattcagaagcagataaagagtcacttcacgtacagattgcagacgaggcgtattgtgtaggaccaacgatttcgaaagaaagctatttaaatttgacgaacattattagcgttgcgaagttaacaggctgcgatgctattcatccgggatacggatttttagcagagaatgcagatttcgcagaattatgccgtgaatgtaacttgatttttatcggtccaagtccagaagctatttcaaagatgggcacaaaagacgttgctcgtgatacaatgaaagaagcaggggttccgattgtaccaggttcacaagggattattaaaaataccgaagaagcgatcgagcttgctaatcaaattggatatccagttattattaaagcgactgcaggtggcggcggaaaaggtattcgtgttgcacgccatgaagaagagcttataaaaggaattcaaattacacagcaagaagctagtaccgcttttgggaaccctggtgtatacttagaaaagtacgttgaagatttccgccatgttgagattcaaataatggcagatacacacggaaatgccattcatttaggagagcgtgattgtacaattcagcgccgtttgcaaaaactactagaagaaagtccatcacctgcacttgatgaagatattcgcaagcagatgggtgaagcggcagttaaagcggcggtagcggttgattatacaggtgctggtacggttgagtttatttatgaatataaaacgaaaaccttttatttcatggagatgaatacgagaattcaggttgagcatccggttactgaaatggtaacgggaatggacttaattaaagagcaaattcttgttgcttcaggagaaaagttatcgttacagcaagaagaagtacaatttaatggttgggcaattgaatgtcgaattaatgcggaaaaccctgccaaaaaatttatgccatctccaggtaaagtagaaatgtacttaccaccaggaggatttggtattcgcgtcgattcagctgtatatccgggatattcaatcccacctttctatgattcgatggttgctaaattaattgttcacggaaaaacacgtgaagaggcaattgcaaaaatgaagcgcgcacttagtgaatttgtcattgaaggcgtacatacaacaatcccgttccatttgcaattgctagatcatcctgattttgtaaaaggtgagtttaatacgaaatttttggaagagcatgaacttgtgacgcagtgatacattaaaggaggtttttttcatggctgaacatatgttagatatgggtcaagatacaactcttggtaaagtagaaattgcaccagaagtaattgaagtaattgcaggtattgcagctgctgaagtagaaggtgtagcggcaatgcgcggtaattttgctacagatgttgttgagaagttaggtaagaaaaatcatggtaaaggtgtaaaggttgaattagcaaacgaagatattatcgttgacctttatgttgtaatgtattttggtgtagcaattccagttgttgcacaaaagattcaagacaatattcgccaagcactctttacaatgacaggacttgagccaaaagaagtgaatgttcacatcgttggcgtaacattcgaaacacaaaaaacagaaatcgaaccagtgtaagaatgaaaaggtgcctagtaacataggcatcttttttatcgtttcatttcttcacaaattacaaccctctaattattatactatttcaaaaaataagaaataaacaaggaaatgtgtcgtttttccaaaaaacgtacattgtgataagatatggaacttgaagttaatctttttattatttttcagccttgtaacccgtgtgtgaaacgataaattgtgttattatcattgtattataaggttggaaaatcaatgaaaactgtaagagtaagtgaattgacggcttataaattataataatataacaaagtataaggaaagacttgaagcataaaggagagttacaatgaaacgtaggacggctagagaaagagcaatgcaagcattataccaaatggatattacaggtgaattagaaccgaaagtagcagtggaaaacacgctggatgaaggcgaagaaacaaatgagtttctagagtcacttgtagtaggttttgtagaaaataaagaagcaatcgatgaagcgattcgtcaaaacttaaaaaagtggaagcttgagcgtattagtattgttgatcgcagtattttacgtgtagctgtgtatgaaatgaagtacatggaagaaattccacacaacgtaacaattaacgaagcaattgaaattgcaaaaacatttggggatgaggaatctcgtcgttttattaacggcgttttatctaatataaaagatacactgtaaattctttaagggggaatcttaaaatggtagcagtaatcatcaaaggaaatgaagttgcggagaaaaaacgagcacaattaacagaagaagttgtgaagttgaaagagcaaggtattgtaccaggattagcagttattttagttggagaagatccagcatctcgttcttatgtgaaaggaaaagaaaaaggctgtgaacaagtagggatttactcagagctaattgaacttcctgaaacaattactgaggaacgtttgcttgctgaaatcgatcgcttaaatggagatgaccgtattaatggcatattagtgcaattacctttaccaaaacatattgaagaaaaagctatcattgaaagaatttcaccagaaaaggatgtagacggatttcacccaatcagcgtgggacgtatgatgacgggacaagatacattccttccatgtacaccgcatggtattgtagaattagtaaaagaaacaaatcttgatatttctggaaaacatgtagtagtaattggaagaagtaatattgtcggtaaaccagtgggacaattgtttttaaatgaaaatgccactgtaacatattgtcattctaagacgcaaaatatgaaagagttatcgaagttagctgatattttaatcgtagctgttggacgacctaaaatgataacagcggattatattaaagaaggagcggttgtaattgacgttggtgttaaccgtttagaaacaggaaaactttgtggtgatgttgactttgacaacgtgttagatgttgcgggttacattacacctgtgccaaagggtgttggtccaatgacaatcacaatgcttcttcataatactgttgaatctgccaaacgtgcaggtgtcgtttgtaaataatttgagtcggctatgaggagagagaaatggagaagcaatatttaaccgttacagcgttaacacgctatataaaaacaaaaatagaatatgatccgcatttgcagtctgtttggttaaaaggtgaaatttccaactttaaaaatcatagccgtggccacatgtattttacattgaaagatgaaaatgcaagaatcgcagcggttatgtttgcgggccataatcgtaatattaaattcaaacctgaaaatgggatgaaggtactcgtgaaagggaaaatctctgtttacgaggcgagtggttcttatcaaatttatattcaagacatgcagcctgacggagtcgggaatttacatttagcgtacgaacagttaaaagttcgtttagaagaagaaggacttttttctcaagtttataaaaaagcgattcctccttacgctaaaacaataggtgtgattacgtcgccaacaggagcagcgattcgtgatattataacaacgattaaacgtcgttatccaattgggaatgttattgtatttccggtacttgtacaaggggagtcagcggctccctcgattgtacaagcgattcgtacagcgaatgaaatgggagagatagatgtactaatcgttggtcgtggtggaggttctattgaggaattatgggctttcaatgaggaaatggttgcaagagcaatctttaagagtgaaattcctattatttcggcagtaggccatgaaacggattttacaatcgcagattttgttgcagatttacgcgcgccaacaccgactgcagcagctgagctggcagcacctaacattatagagttacaagaaaaggtattacaaagaactctgagattgcaaagagcaatgagagagttagtacataaaaaagaagaaaaactacaagtgttgcaaaaatcgtatgcgttccgttatccaagacaagtatatgagcaaaaggaagagcaattagatagagcgctagaacagcttgttttagcgaaagagcgctatattgataaaaaggtgaatcagttaaagcaactttcattttatttagagaagcaccacccatctcaaaaaattatgcaaacgaaggtagctgttgaaacgttgcaaaagcaattacaacgtgaaatgcaaacgttacttcaaacgaaagaatttgcctttgtaagagctgctcaaaaacttgaagcgttaagtccgcttaaagtaatgatgagagggtacgggcttgtatatgatgaagagaagcaagtgttaaaaagtgtgaaagatgtaagccttggagatgctgtttcagttcaattacaagatggaatactagattgtagcgtatcaggcatagaggagcgtgaattgaataatggaaaataaattaagctttgaagaggcaatttcgcaacttgagcatcttgtttctaagctagaacaaggtgacgtacctttagaagaagcgatttcttattttaaagaaggtatggaattatctaagctttgtgatgagaagctgaagaatgtacaagaacaaatggcagttattcttggggaagatggagagcttgaaccgtttactgctttaggagatgaagcatagtgacgattgcttttgatacttttttgaaagaaagtaaaactttcgtagaagaaaaacttgtaagctatgcaaatgaattacaatgtccaaatgtacttcgtgaagcgatggcatattctttggaagcgggtggaaaacgtctccgcccgttacttttgtttgcaacattacaagcgtttgggaaagaaagaaatcttggagtaggtgcagcttgtgctcttgaaatgattcatacatattcattagttcatgatgatttaccttgtatggatgatgatgatttaagaagaggaaagcccacaaatcacaaagtatttggtgaagcgatggcagttttagcaggagatggcttattgacgtatgcttttcaagttattatggcatatgagcaaaaagaaatttctgccgaaaaaaaagtaagacttgtacttgaacttgcaaaagcagcaggaccagaaggaatggttggcggacaagtggcagatatggaagctgaagggaaacgccttacgattgatgaattggagtacatccataaacataagaccggaaaactgcttgaatttgctgtacttgcgggtgcgatactttctgatgcgacagaagagcaagaagaaaagttgcttacgtttgccaaatatatcggtctagctttccaaattcgagatgatattttagatgtcgaaggaactgaagaagagattggaaaaccgattggtagcgatctttctaatgaaaagagcacatatacaacgttgtttactgtagatagagcaaaggatattttagaagaaacaattgcagaagcaaaaggtgcgattagttccttgcaattacaagatgaatatttactatctatttgtgatttgattgcaaaacgtaataactaatataacagcgttttcatttgttgagtcattcatcattttatgatataaatgtaggaaaaggtttttcttttcttgttattggcaaaaatatatgtagattacattgccgttatcacttcgtgttagcggctatttttttcatcgcctaaagaaatatggtttataataggattagggcgcaatagactggttaatagcgggacaagacgaaaaatagaaaagagaatttcttgttttgtgtaaatgttttttataatatttgacatgttgacagattatgaaatgaaagtgagtgatccatgtggatctaacgcaaattcaaaaccctagttttttgaaagatatgtctatcagtgaactagagggattgagtgaggatattcgtaagtttttaattgaagagctctctcaaacaggtggacatattgcacctaatttaggtgtagtagaactcacaattgctctgcacaaattatttgatagcccgcaagataaatttttatgggatgtaggacatcaatcctatgtacataaaattttaactggacgtgcgaaagagtttggtacattaaggcaatatcaaggtctatgtggtttcccgaaacgttgcgagagtgagcacgatgtatgggaaactggtcatagctcgacttcgttatcggctgcaatgggaatggctctggcacgtgatttaaagaaaacgaaagaatatgttataccaattattggagatggtgctttaacaggcggaatggctttagaggcattgaaccatattggacatgaaaaaacagacatgattgttattttgaatgataatgaaatgtcaattgcaccaaacgttggtgcgcttcataatgtgctcggtcgtttacgtaccgcaggaaaatatcactgggtaaaagatgaattagagtatatattaaagaaaatcccagcagttggcgggaaagtggctgcgacagcagagaaaataaaagatagtcttaaatatttactagtatctggtgtctttttcgaagagttaggctttacatatttaggtccagtcgatgggcatgattatgaaaagttattcgaaacgttgcaatatgcaaagaaaacaaaaggcccagtgcttgttcacgttattacgaaaaaaggaaaaggttataaaccggctgagagtgacgttattggaacttggcatggaacaggaccttataaaattgaatcaggtgacttcgttaagccgaaagaagttgcaccagcatggagtgctgtcgttagtgaaacagtacttaagctagcgagagcggatgagcgtatcgtagcaattacacctgcaatgcctgttggatcaaaacttgagaaattccaaaaagaattcccagatcgtatgattgatgtaggtattgcagaacagcatgctacaacaatggcagcaggtatggcaacgcaaggaatgaagccattcttagcgatttattcaacatttttacaaagagcatatgaccaagttgttcatgatatatgccgccaaaatttaaatgttttcatcggaatagatcgctcgggattagtaggagcagatggtgaaacgcatcaaggcgtatttgatatctcattcttacgtcacttgccgaatatggtgcttatgatgccgaaagatgaaaatgaagggcaacatttagtttatacggcgatgcaatatgaagatggaccaatcgcattgcgttatgctcgcggtaatggacttggcgttcatatggataaagaattaaaggcgattccaatcggtacgtgggagacgttaaaagaggggacacaagcagctattttaacgtttggtacgacaataccaatggcaatggaagcagctgagcgtcttgaaaaagctggggtttcagtgaaagtagtgaatgctcgctttattaaaccaatggatgaagcatatttacatgatcttctaggaaagaatataccgattttaacgattgaagaagcttgtttaatcggtggttttggaacaggagtagttgaatttgcatctgaaaatggttaccatagtgcattagttgaacgaatgggtattccagaccgcttcatagagcacggaagtgtaacaaaattattagaagaaattggtttaacgacagatgctgttgtagaccgtattcatacaatgattccatcaaaacaaaaaagggcgtaacaaatgagcgtaaaaaaagaaagagtagatgtactattagtagagcgaggacttatagaaacgcgtgagaaagcaaagcgcgccattatggccggactcgtatatgcaaatgagatgagacttgataagccaggagagaaaatctcgcaagatactgagattacggtgaagggacaagttatgccgtatgtaagtcgtggtggttataaacttgaaaaggcattagagacatttcatcttgatttacaagataaagttatgatagatattggttcatcaactggtggctttacagattgcgcgcttcaaaatggagcgaaattatcttatgcattagatgtaggatacaatcaactagcgtggaaattacgtcaagatgagcgtgttgttgtaatggaacgaacaaacttccgttacgtgacaccggcagacttagaacgtggtttacctcaatttgcaagtattgatgtttcatttatatcattaaagcttatactgccagttttaaaaacaatgcttatgcctaacggagatgtagcagcgttaattaaaccgcagtttgaagctggaagagagcaagttgggaaaaaaggtatcgttcgtgatagaaaagtacatgaagctgttgtagaaatgattgtcgagtttgctttaaaagaaggctatgatgtggaaggtttaacattctcaccaattacgggtggggatggtaatattgaatttttaattcatctgaaatggcatggtgaacgtgagaatggcgaaaatcattctccgatttctatagagcaagttgttacagaagcgcatgacgttctaaaacaaaaagggaaaggggaataacatatgttgttcctctttttgctgtaattgtataatgattgtaaaaacaattgtgtacaagaaacgaattataagttaacataaataagtgaagtataccaatgtttaaactatggtaagagatagtgtgaggtgcaaatgtatgaataaaggtcagcgccatattaaaatcagggaaattattgcaaacaaagaaattgaaacacaagatgaattagttgatattttacgtaatgagggatttaatgtaacgcaagcaacagtatcgcgcgatattaaagaactgcacttagtgaaggtgccattacatgatgggcgctataaatatagcttgccagcagatcaacgatttaacccgttacaaaaattaaaacgaaatctagtggattcatttgtaaaattagacacggcaggacatatgcttgtgctaaaaacattgcctggtaacgctcattcacttggagcacttattgatcatttagagtgggatgagatcatcggaaccatctgtggtgatgatacttgcttaattatttgccgtacacctgacgatacaggtgttgtctctgatcgtttcttaaatatgttgtaacaaaaaatcttgtttgctttccatcgtaaagtggaaagtgaacaagatatttttattggttaaaaatatgaattttcaattgtaatataatattttgtttgcataaagttaaaaaatagatggattgacccgtaaaacaaatgtttggtacaatgaagcgggttagaagagtatatacatacaaatatatagcatgattatttgaatgaagaactgagaaaatcctttagtaagggattattttataacgaggtgaatggggcattgttatcggaattatcgattagaaactttgctattattgaagcattaaatatttcttttcaaaaaggtttaacggttttaagcggtgaaacaggggccggaaaatcgattattattgatgcaattagtttacttgtaggtggccgtgggtcagcagaatttgttcgatatggaacagaaaaggctgagattgaagggctattttatgttgaagatgagaagcatccatgtattgaaaaggcagaagagttagatatagaaatagaagatggtatgattattttaaagcgtgatattgctgcgaacgggaagagtgtatgtcgtgtaaatgggaagcttgttacacttagcatattaaaagaaattgggaaaacacttgttgatattcatggacagcacgaaacgcaagatttaatgaatgaagaacgacatctgtttatgcttgatcactttgatggggatcgaatcgttaaacaattagacatatatcaaaacgtatacgctgactatgaaaaattaaaaaaacaattgaaatcgttaagtgaaaatgagcaacaaatggcacatcgcttagatttaattcaatttcagcacgaggaaattcgcaaggcggatttaaagatggatgaagaaaatgaattaactgaggaacgattgcaaatttctaattttgaaaagatttataaagcgttaggtgatgcatatcgttctttaagtgccgacggacaaggattagataatgtaagaagtgcaatggggcaaatggaaagtattacacatttagatgaagtgtatcaagagaatcatgattcaattgcaaatagctattacttattagaagaggttgcctatcaactgagggaaaagctcgatatgatggaatatgatccaaatcgtttagatgaaattgaaacacgtttgaatgaaattcgtatgctaaagagaaaatatggaaataatgtagaagagattttagcgtatgctgataaaattgaacaggaaatttttacgattgaaaataaagacgttcatattgaaacgacgaagaaacagttgaaggaattagaaagtgttattatgaaagaagcaacgttgttaagtgatatgcgtcatgagcttgcagaacaccttacaaatgcaattcatcaggaattaaaagaattatatatggaaaaaacgaaatttgaagtgagaattatgaagagagaaggaaatgcagaagagccccttgtggaaggtgcgccggtaagacttacggcggatggttacgatcatgtggaattttatatttcaacgaacccaggagagccgctaaaaccactttcaaaggttgcttctggcggagagttatctcgtatcattttagctttaaaaagcattttttctaagcatcaaggggttgcatctgttatttttgatgaagtggatacgggtgtaagtggccgggtcgcacaggctattgcggaaaaaatttatcgagtatcagtaaactcgcaagtactttgtattacgcacttacctcaagtagcttcaatggcggattcacatttatttattcgaaaacaagtagcgaatgatcggacaattacatcagttactgttttaactatggaggataaagtaacagaaatagctcgaatgatttctggtgtggaaatcacagatttaacgacagagcatgcgaaagaattacttacgcaagcgcatcattttaaacagacagcagaggctatccagtaatggatagctttttttctcaaatgacgatttcttaattcttccggttataaataaagcactgcaaggagagattaaaaagtgaagccaagaggctgaatgtggggtaggagcgaggagagtgaacaagttgaaattagaaaaatttcgaaaaataataggtctttgtctccttgtttctttagtttttattggatgttttaaaccgcttcgaacgtttatttcatcaccgaaacaacttgttgtttttgaagggcaacaatcagaaatatcatcattaccagttttcaaagcttcatccacaaatcgtcatgtatttacagtgagttcgaatgaacaaaaacaaggacttatggtaaattctcatcaaaatggtgaagctgatatggtatttcagcttgctggttttccagtgaaaaaagtaaatgtgaaagtgttaaaagattttaaagtgattccaggtggacaatcaattggtgtgaaattaaatacaaaaggtgtacttgttgtaggccatcatttaattcaaactgaaaaaggtaaaatatctcctggtgaaacagcaggtgtacaaattggagatatgattactgaaattaatggtaaaacaattgaaagaatgagtgatgtagcaccgtttattcataatagtggagaaacaggtgaaccgcttactcttgtattgttaagagatggaaaatatattcgtacgaagctaactccacaaaaagacaacggtgaatcgtcttatcgaattggcttgtatatccgtgattcggcagctggaattggaacgatgacatttgttcatccagattctatgaaatatggggcacttggtcatgttatttctgataatgatacgaaaaagccgattcaagtcgaagatggacaaattatgcgctcgacagttacatcaattgaaagaggtagtcatgggaatccaggggagaaattagcaagattctcaccagaccgtgaagtgattggcaatattacaattaatagtccatatggtatttttggaaaattaaatacgaatatgaaaaacggtataatggataaagcaatgcctatcgcattatctcatcaagtaaaagaaggaccggcaaaaatattaacagttattgatcaagataaagtagaagcgtttgatattgaagttgttagtacagtgcagcaaaaattcccagccacaaagggtatggtaataaaagtaacagataaacgtctattagcgaaaacgggcggtatcgtacaaggaatgagcggaagtccaattgtacaaaatggaaaagtaattggtgctgttacacatgtatttgtaaatgatccaacatcaggatatggtgttcatattgaatggatgttacatcaagctggaattaatatttatgatcaagagaaaaaagcgagctaatatatattattagctcgctttttctgttgaaaaattcgttgaaattttgtaaaagctccgcaagaggtgttttttgttgtaaaataaaaggaaagggttgaacgtttcgttgtatttctatgatggaatgtgttgcgaaagggaataaatgagcgataaacatatttttttgtgattttatcggaaagtaagaaactttaaaagggaattttcacacaattgtcgaacaattcatgtagcctagaaggatacacatgtcggagaatcgattcggtaagggaggaaaagctgtggagaaaattaaagtatgtcttgtggatgataataaagaactagtatcaatgttagagagctatgtagccgctcaagatgatatggaagtaatcggtactgcttataatggtcaagagtgtttaaacttattaacagataagcaacctgatgtactcgttttagacattattatgccacacttagatggtttagctgtattggagaaaatgcgacatattgaaaggttaaaacagcctagcgtaattatgttgacagcatttggccaagaagatgtgacgaaaaaagcagttgacttaggtgcctcatatttcatattaaaaccatttgatatggagaatttaacgagtcatattcgtcaagtgagtggtaaagcaaacactatgattaagcgtccactaccatcattccgatcagccacaacagtagatggaaaaccgaaaaacttagatgcgagtattacgagtatcattcatgaaattggtgtacccgctcatattaaaggatatatgtatttacgagaagcaatctccatggtatacaatgatatcgaattattaggatcgattacgaaagtattgtatccagatatcgcaaagaaatataatacaacagcaagccgtgtggagcgcgcaattcgtcacgcaattgaagtagcttggagccgtgggaatattgattctatttcgtccttattcggttatacagtatccatgtcaaaagcaaaacctacgaattctgagtttatcgcaatggttgcggataagctgagacttgaacataaagctagttgagagtaaaagtagtaagggatttaagttttagtaaagcttaataattcttgaaattgatactcgatatcaaatttaaaaccaatgaactttttatttaaagaccaatgaatgttataattcgttggtctttttattttgttgagaaaaagagattatttgatagtatggaaaataaaacctatttttagtaatattacatgtaagtgagttttttataaggcaataaaatagatatagatagggagaaggggaatggaaaataaaatttcaacttggctaggaatagtagcagctatgggagttcttgctattgcagttacatttggaatgttagaacttgcagataatcccgtagataaagaagtgagcgctcaaatagataaaaaagaagaccaaacaatagtaggtagagaggtagatggggtctttgttgatgtgtatgttactgaaaattctactgaaagcgaagtcattacagcgatgcatcgcatgactcatcaaaaagtggtggcagaacgaaaatcgggctctatcccaatgattcaaagtaatgctaaaaaattaaaagaaattataaataagagtagctttgcgaagaaaaatgaacttttagcaattgctgatagatgggcgaaaaaagattttagtaaaattgtagaagatcacaattatttctcggatgctcaagaagatagcgtttgtaaagcaactagagcaatggatgcgttagaagagcaacattatattttaactacattcggggaggaaaaagcgaaagaactatacgaatcaggggatgctccgcacgttcaataaaaaacaatataaagggcttctagtttttttatgatcgtgtttttaggacgcaatggggacttataaataaatggtctgctttctttatgacgtgtaacaaaaaagaaaagatgtgattcattattaaatgatgaaggaacggctaaatcacatcgtagtacatctgttaaaggattttagtaggaaaggcatccgtgatataatagaaaataataaaaagtcctgcaaaacaggactgtattattcttcgtctttattttgtttttctaattcaactagtttttgaattaaaatgtgctgcggcatatgcatgagttgttcaagtggaacacctagtgcttttgataagcggactgcagtatctggagagatttgtaatggtctcatagaagtacctcctttttcgtatagtatagcataagattgggggagtgaggatgactcttatatttgcacatcgtggtgcggctggaacgtacccagaaaatacaatgatttcatttgaagcagctgagtcttttagagcggatggaattgaacttgatgttcaattaacgaaagatggaaaagttgtcgtcattcacgatgaaacggtggaccggacaacaaatggaaaaggtgcggttcgcaattatgtatatgaggacttatgcaagttagatgcaagttataaatttggtgataaagtaggtttttgtaaaataccacttttagaagaggtattagaatggcttgaacaaacgagtttgctacttaatattgaacttaaaaataataaaattccatacagaggtttagaggaagaagttataacgcttgtacggaaatttagtctagaggatcgtgttatattttcttcgtttaatcactacagtatgaaacggtgccatatgatggctcctgatattcaaacagcaattttatatcgcgaaggtttgcatagtccgtgggcatacgcgaaaaaaatgggggctacagcagtacatccgaattatcgttatcttcaagatgctattgccgaactaacgatggaaagtggtgtagaagttcgcccttatacaattaatgaagaaacgcttatgcgtaaatattttgatatgaatatatcggcgattattactgattaccctgaaacggcaagaacgttattgccaataaaaaaatgagaccgcgtgtaacggtctcatttttttatttataaatagtggggcattcctatcttctaaagcgagcttgtactttatttcgtttgcgatctcggtgcaagacgaagccaccaaagatataaaacccgagcgcgaagcagagagcgccgattaaaaattgtaaccacagtatggaaattggtggaaatagaatcccgaatacagtatctctcattaactttataccaaacacagctaatgaaatagggataagtgctaatagtagagcaacgtaacgctgcatacataacgctccttttcagattatttcgtatattttaatgatgttatacggaaagggggtttgtcaagagggtgctgaacgagtaagataagggtgtgaaaaaatttgcagagttacttcgagaggaagtgtaatatatgaaacaaaaagtattaattgttggtgcaggtgaaggcgggagcgcgctgctgaatctgttacaaagttcgaatatatttcaaattatagggattattgatataaatccgttggcaaaaggactacaaattgctaaggaatacgggattgcaattggagaaagtgtaactccatttctttctatgcatatcgatgtaatatttgatatgacaggtgaagatgatgtacataaagttttattagaaaaaaagaaaaaagacactcttcttataccaggtgatatcgcaaaaattgttacaggattagcgcatgagaaggaagggctaattgggcggttagaggaacagacgcaacaaggagaattaattttaaattctacacatgacggcatgattgtaattgatcgagagggacaagttcgtctttttaataaaagtgcagagcgtattatcggatataaaaaagaagaggcgataggaaagtatattttagaagtcattccaactagtaaattacttcgcattatacgtacgaaacaaatagaagtaaattatgaactgacattagagaatggaaagaaaattattacaacgcgtattccaatattaaaagaaggaggagaggtacaaggggcatttgcaatttttaaagatataacagaagttgtagatcttgcggaagaagttacagacttaaaagaaattcaaacactattagaggcaattattaactcatctgaagaagcgatttcggttgtggatgaaaaaggaagaggtttagtcattaacccagcatatacgaaattaacgggtttaacagaagaagatattattgggaagcctgctacaactgatattgtagaaggcgaaagtatgcatatgaaagtacttcgaacgcgtcgtgcggtgcgcggaatacatatgaagattgggcaaaaaaagcgagatgtaattgtaaacgtagcaccagttattgtggatggaatattgaaaggaagcgtcggtgttatccgtgacgtgtcggaaattcaaaaattaacaaatgaattgaatagagcaaggcaaattattcgtacattagaagcaaaatattcatttgatgatattgtcggaaattcagatgaaacaacggcagctatcgaacaggcgaagctaggagcgaatacaccagcaacagtactgttacgcggggaatctgggactggtaaagaattgtttgcacatgcaatccataatggaagtaatcgaaaatacaataagttcgtccgtgtaaactgtgcggccatttcggagacgttgttagaaagtgaattatttggttatgaggaaggggcgttttctggagcgaaaagaggcgggaaacgtgggttctttgaggaagcgaataacggtagtatttttttagatgaaataggggagttgtctgcaaatacacaagcgaaactccttcgtgtattgcaggaaaaagaaattgtaaaagttggtggaacgaaagcgatacctattaatgttcgagtaattgcagcgacacatgtgaatttagaaaaggctattctagaagggaagtttagggaggatttatattatcgattaaataaaattccaattcaaattccatctcttcgtcaacgtaaaggagatataccgacaattgcggacagattgattcaaaaaattaatcaagattacggtcgtaatgtagaagggctcactgattcagccgttttatatttacaatcatacgaatggccaggaaatgtgagggaacttgaaaatattttggggagagctattatctttatgaattataacgagacctatattgatgtacaccatttaccgccattacataacgaagagcaggtggagtcaaagcaatctcatttattacctgaattagaagaaaagccacttgaacatttagtgacagagtttgaagggaatattatttatgaatatttggagagatttgatgggaataaaacacaaactgcaaaagcgttaggaatttccgttcgaaatttatattacaagctagaaaagtatgaccatgcaaaaaatagcatgcaataaattgcgtaccatgcaatttattgcatggtatacaaaaagcgacaaaataagacagaatctttcgttattttctaaagtattgattttactgcattttgaatgcgttttcattattggtaagaccacttttaaaagttggcacggtatttgctttataaatagacgagggacgacggaaagggttgattacaaaatatgaagttagaatacttaattgatcaagcagcaggaaagcctaaaaaaactgtggctgtagcagtagctgaagatcatgaagtaattgaagctgtagcgaaagcaattaaattacagctagctcaatttcgtctatatggaaatcaagaaaaaataatggggatgctacaagaacatggtttacaaacttcagaacatgttgaagtgattgcagcaatgtctagtgctgaagctgcagaactttctgttaaagctgtgagaaatggtgaagcagatgtgcttatgaaggggaacatcccaacagcgaatattttgaaggctgtgttaaacaaagagtggggcctacgtaaaggtagcgtactttcacatgtagcagcatttgaagttcaaaattacgatcgtcttattttcgttacagatgcagcgatgaacatcgcacctgacgtaacacaaaaagctgctattatacaaaatactgtagaagttgcccgggcaataggaatcgacttgccaaaagtggcaccaatcgcagcagtagaagttgtgaatccagcgatgcaggcgacaattgatgcagcgatgttaacacaaatgaatcgccgcggacaaattaaagattgtatcgttgatggaccacttgctttagataatgcagtatcacaaattgcagcagaacataaaggcatagtaagtgatgtagcaggtaaggcagatattttactcgtcccaacgattgaagctggaaatgtgctatataaatcactcgtatactttgcggatgcaaaagtaggagcaatgattgctggcgcaaaagcaccaattgttttaacatctcgtgctgattcagcagaaacaaaagtatattcattagcattggcagttgcgactgcttcaaaataaaccaaaaagggtaaaacattagggggaaacgacaatgacattagaaatcttcgaatacttagaaaaatatgattatgagcaagtagtattttgtcaagataaagaatctggtttaaaagcaattattgcaattcatgatacaacacttggaccggctcttggtggaacaagaatgtggacatatgattctgaagaagcggcgattgaagatgcattgcgtcttgcaaaagggatgacatataaaaacgcagcagctggtttaaacttaggtggtgcgaaaacagtaattatcggtgatcctcgtaaagataagagcgaagcaatgttccgtgcactaggacgttatatccaaggactaaacggacgttacattacagctgaagatgttggtacaacagtagatgatatggatattatccatgaagaaactgactttgtaacaggtatctcaccatcattcggttcttctggtaacccatctccagtaactgcatacggtgtttaccgtggtatgaaagcagctgcaaaagaagctttcggtactgacaatttagaaggaaaagtaattgctgttcaaggcgttggtaacgtagcatatcacctatgcaaacatttacacgctgaaggagcaaaattaatcgttacagatattaataaagaagctgtacaacgtgctgtagaagaattcggtgcatcagcagttgaaccaaatgaaatttatggtgttgaatgcgatatttacgcaccatgtgcattaggcgcaacagttaatgatgaaactattccacaacttaaagcaaaagtaatcgcaggttctgcaaataaccaattaaaagaaaatcgtcacggtgacatcattcatgaaatgggtattgtatacgcaccagattatgtaattaatgcaggtggcgtaattaacgtagcagacgaattatatggatacaatagagaacgtgcactaaaacgtgttgagtctatttatgacacaattgcaaaagtaatcgaaatttcaaaacgcgatggcatagcaacttatgtagcggcagatcgtctagctgaagagcgcattgcaagcttgaaaaattctcgtagcacttacttacgcaacggtcacgatattattagccgtcgctaatcattcatatataacttttacaaaaggcgtggttatctcgtatgaggtttccacttccttttgaatttattagtggaggtagcaacattgtctgtaaatcgaattcttgttattaacccaggtagtacatccacaaaaattggtgtttttgataatgaaagacccgttttagaagaaacgattcgtcatgacgtagaacagattgggaaatacaagcgaattatcgaccaatatgagtttcgaaaagaaacgattttagaagttctacattctcatggtattaacatttcaaagttaaacgctgtttgtggacgtggtggattacttcgtccaatcgaaggcggtacgtatacagtaaacgatgcgatgttagaagatttaaaaaatgggtttagcggtcatcacgcttcaaaccttggaggcattttagcatatgaaattgcttctggattaaacattcctgcatttattgtggatcctgtcgttgtagatgagatggagccagttgctcgtataagtggtattgctggtatggaacgtaaaagtatcttccatgcattaaatcaaaaagcagttgctcgtaaagtagctgaacagttaaaccacaaatatgaggatttaaatttattagttacgcatatgggcggtggtattacagttggtgctcataaaaaaggaagagtaatcgatgtgaataacggtttaaacggagaaggaccatttagtccagagcgtgctggtacagtaccagtagggcaactagtagaaatgtgtttctctggtgagtattaccgagatgaaatgattaaaaagcttgtcggacaaggtggacttgtaagtttaatcggtacaaatgatgcgattaaagtagagaaaatggttgaaaaaggtgatcctgaagcaactcttatttataaagcaatggcatatcaagttgcaaaagagattggtggagctagcgctgtacttcacgggaaaatcgatgcaatcgtattaactggtggactggcatacagtaaaattcttgtcgatgaaataaaagagcgagtggactggattgcagatgttatcgtacatccaggcgaagatgagttagaagcgttagcagaaggagcacttcgtgtattacgtgaagaagaagctccaaaagaatacgttgtacgtgaaaaagaaacggtagctaggggttgagataatggcaaaagaatatgatttagtcatcgttggcggcggtactggtggatatgttgctgcaattcgtgcatcacaactagggttaaaaactgcactagtcgaaaaagaaaatcttggtggtacttgtttacacaaaggatgtattcctagtaaagctcttttacgtagtgcggaagtatatgcaactgctaaaaaaagcgaagagttcggagttattgcaagcaatgtagaactaaactttgcgaaagtacaagagcgtaaagagaagattgtaacgcagcttcataaaggcgttcaacatttaatgaaacaaggtaaaattgatgtgtttgaaggtattggccgtattcttggcccatctattttctctccgatgccagggacaatttcagttgaacttgcaagtggagaagagaatgaaatgttaattccaaaaaatgtacttattgcaacaggttctcgtccaaattcattaccaggtttagaattagacggagagtacgtaatgtcttcagatcatgccctaaaaatggaaacgcttcctagttcaattattatcgttggtggcggtgtaatcgggattgagtgggcatctatgcttgctgacttcggtgtagaagttacagtattagagtatgcaaaaacgatattaccactagaagatcaagatgtttcaaaagaaatgcaacgtctattcaagaaaaaaggtattaaagtggtaactggtgcaaaagtattaccagaaacattggtaaaagataatggagtaacaatccaagctgaacacaacggtgaaaataaagaatttaaagcagaaaaaatgcttgtatctgtaggaagacaagcgaatacgcaaaatattggcttagagaacacagatatcgttgtggaaaaaggatacattcaaacaaatgagttttatcaaacgaaagaatcgcatatttacgcaattggagatgtaatcggtggcctgcaacttgctcacgttgcttctcatgaaggaattgctgcagtagaacatattgcagggaaagaagttacaccaattgattactctatggtatcaaaatgcgtatatagcagtccagaagttgcttctgtcggtttaacagaacaagaagcgaaagaaaaaggctataagttaaaagtaggtaagttctcattccgcgcaatcggaaaagcacttgtatacggagaatcagatggtttcgtaaaacttgtagttgatgaagagacaaatgacattcttggtgttcatatgattggaccgcatgtaacagatatgatttctgaagcgggtcttgcaagagtacttgatgcaacaccttgggaagtagcacatacaattcatccgcatccatcattatctgaggcgattggtgaagcagcacttgctgtagatggaagagcgttacacgcataaaaatgtggatttaggaggttatgaaaaatggcagaagtaaaagaaaagcgccatgaagagcttggcttaagtgatgagcaagtattagaaatgttccgtacgatgttacttgcacgtaaaattgacgaacgtatgtggttattaaaccgcgctggtaaaattccattcgtaatttcttgtcaaggacaagaggctgcacaagttggagcggcgttcgctcttgatagagagaaagattatgcattaccatactaccgtgatatgggtgttgtactagcatttggtatgacagctaaagagcttatgttgtctgctttcgcgaaagctggagatccaaactctggtggtcgtcaaatgcctggtcacttcggtcaaaagaaaaatcgtattgttacaggttcatctccagtaacaacgcaagtaccacatgcagttggtattgcactagctggaaaaatggagaagaaagatttagtaacgttcgttacatttggagaaggttcttcaaaccaaggtgacttccatgaaggggcaaactttgctggtgtacacaaactacctgttatttttatgtgtgaaaataacaaatatgcaatctctattccagttgaaaaacaattagcatgtaaaaacgtatcagatcgtgcgattggttacggtatgcctggatatacaatagacggaaacgatccgcttgcagtatataaagctgtaaaagaagcagcagatcgcggtcgtcgtggtgaaggcccaactttaattgaaacagtatcatatcgtttaacagcacattctagtgacgatgatgatcgtgtttatcgtgataaagaagaagtagaagaagcaaagaaaaaagattcaattataacattcgcggcttatttaaaagaagctggtgtgttaactgaggaatcggaaaaacaaatgttagacgaaattatgcatatcgtaaatgaagcaacagaatatgcagaaaatgctccgtatgcagcacctgaagatgcattgaagcacgtatacgcagaataggggggaacgtttcatggctgtaatgtcttatattgatgctattacattagcaatgcgcgaagaaatggaacgcgatgagaaagtattcgttttaggagaagatgttggtaaaaaaggtggcgtgtttaaagcgacacacggtttgtatgatcaatttggtgaagatcgtgcgcttgatgcaccgcttgcagaatctgcaattgctggggtagcaattggtgcagcaatgtatggtatgcgtccaatcgctgaaatgcagtttgctgatttcatcatgccagcagtaaaccaaattgtttctgaggcagcaaaaattcgttatcgttctaataatgattggacttgtccagttacaatccgtgcaccatttggcgggggtgttcacggtgcattgtatcattcacaatctgtagaagcgatgtttgcaaaccaaccaggtttaaaaatcgttatcccttctacaccatatgatgcaaaaggcttattaaaagcagccattcgtgatgaagatccagtattattctttgaacataaacgtgcatatcgtttaattaaaggtgaagtaccggaggatgactacgtattaccaatcggaaaagcagatgtaaaacgtgaaggtgatgatattacagttatcacgtacggattatgtgttcattttgctcttcaagcggctgaaaagttagcacaagatggcatctctgcacacattcttgatttacgtactgtatatccattagataaagaagcaatcattgaagcagcttctaaaacaggtaaagttcttcttgtaacagaagacaataaagaaggaagcattatgagtgaagtggcagcaattatcgctgaaaactgtctatttgatttagatgcgccaatcgcacgtcttgcaggtccagacgttccagcaatgccatatgcaccaacaatggaaaaattctttatggtaaatccagataaagttgaaaaagcaatgcgtgaacttgcggaattttaatcggggggactatacatggctgtagaaaatattacaatgcctcagctcggggagagcgttacagagggcacaattagtaaatggctcgttaatgttggcgatcacgtaaataagtatgatccgcttgcagaagtaatgactgataaagtaaatgctgaagtaccatcttctttcacgggtgttgtgaaagagttaatcgctggtgaaggtgatacgttagctgtaggtgaagtagtttgtgttattcaagtagaaggcgcagatgaagtagcagcaacagctgttgaggaaaaaacaaaagaagaatcaaaggcagaaatagctacgtctgaaaaagcaccgaaagtaaagcaaccaactgatggaaaaccacgtttttcaccagctgtgttaaagcttgcgggtgagcataacgttgatttagatctagtagaaggtacgggagcaaacggccgtatcactcgtaaagatattttaaagcttgtggaatctggaaatatcccacaagcaggtgcggcgaagaaagaggaagctgtagcggcagtagtagaagctcgcccagaagcaccaaaagcagcaccagtagcgcaaaaagtagaagctgcgaaaccagtttctgtacctacaatgcctggagatattgaaattccagtaacaggtgtgcgtaaagcaatcgcagcaaacatgctacgtagtaaacacgaagcaccacatgcttggatgatgattgaagtagatgtgacaaaccttgtgtcataccgtaactcaattaaaggtgactttaagaagcgtgaaggctttaacttaacgttctttgctttcttcgtaaaagcagtagcacaagcgttaaaagagtatcctcaaattaattcaatgtgggctggcgataaaattgttcagaagaaagatattaacctttctatcgctgttgcaacagaggaagaactatttgtaccagtaattaagcaagcggacgagaaaacaattaaaggtattgctcgtgaaattacagaacttgcaggaaaagtacgtacgaaatcgttaaaagcagacgaaatgcaaggtggaacatttacaattaataacacaggatcattcggttctgttcaatctatgggtattattaattacccgcaagcggctattttacaagttgaatcaattgtaaaacgcccagtaattatggataacggtatgttcggtgctcgtgatatggttaacttatgtttatcacttgatcaccgagtacttgatggtttaatttgtggtaagttcttaggacgtgttaaagaaattttagaaaacatgtcagaaaataatacatctgtatattaataaaaagctcgcttatgcgagctttttattatcttatttcttcatctacatcctactatatgtataaatatctttcccagtaatcttacaataaacgattatgtattaggaatttacgaaaatacattgctgatatatggtatatggatataaaataagaaaagaataatttttttggcaaatcttactgacgaaactgtagtataatatattgtattgtatgaaaaagagagttattctatataagtgttttatagataatgtgtaatcagtcgtcaaaacatgaagaatgttgactcctggttttttatttttgccgtaacaatgtttcaggaggatgtcatgaaaagaagtaccgagtttctaaaaagtttagatgtaaaattaattttaattttgtgtgcactatgtgtgacgagtatagctgctatatatagcagtcagcaaacgggacagtatggagctgcaaactttgctatgaaacaaggtgttaactacataattggggttgtattgttacttcttgttgcaagcatcgacttagatcaattgcaaaaattatcttggccgctttatattgctgggtttgcttcacttattcttttgaaagtattaccaccatcaggttttacacctgaaaaattaggtgcaaaaagatggtttgttttcccagtatttggacaaattcagccgtctgagtttttcaaaattgcattgctacttgtagtagcgagtatagcagtgaaacataatgcacagtatatggcaaggacattccaaacagatttaaagctagtaggtaaaattatgctagtgtcacttccacctatggcggttgtatatagtcaacctgatacaggtatggtgttcttatatgctgctgctattgcatgtattttatttatgtcaggtattcaaaagaaattgatagcattatgtacagttattccgttgaccatattatctgctttaatatttattttctttaagtatcaagattttttctataataatttagttactttactaaagcctcaccaacagtcgcgtattgtaggttggttaaatccatttgaaaatgcagatcaaggttatcaaacacagcaatcgattttagctgtaggtagtggaggaatggaaggtaaagggtttgggggaggaagcgtctatattcccgagaagcatactgactttattttcgctacaattgccgaagaaggtggatttatcgtagcagccttagttgtcttcttgttcctattactactatatcgaacaattattattggttattccgctgataatttatttggtacattattatgcgctggatcaatcggtatattaacagttcaaatattccaaaacatcggtatgatcgttggattaatgcctgtaaaaggtattgcattacctttcttatcgtatgggggaagttccttattctcaaatatgattatgatggggctcatattatcggtacggaaaacttataaaaaatatatgttttcagttaagtaaaaaaagctggttcgtttttaaacgaaccagctttttttacatatatgctcataaacgttgcaaactaaaacaggatagcagtttgagacgggtaaggagtgcaaagtgatgcatatgcatatttttgaaggagcacggcatctttctaatagtgaatgggttattcgggctattatagcatacatatttttaatattagttgcgaaagcgatggggcaaaggtctatcgcacaacttcgttttttagatgttgtattagtgttattgcttggtgggaatatttctaactcattgtctgatgaaaaagtagggttactgggatcgatgattacaacgttcatacttgttgtacttcatattataagctcagttttaatgctgaaatgggatagatggagacgttttttagagccagcacctattattcttatacataatggttccattgattttagcaatttgaaaaaggcgagaattaacgtggaatatttgttttcggaacttcgtatgcgaaatgtgagcgatattcaaacgattaaattagcattatgggaagcgaacggtgtcgtttctatatttcggtatccagaatatgaagcagtttcgcggcttgatcttaaagtggcgggaaaaaaatctccagtttcttttgtattagtaaaggatgggaggatacagaaagatgttcttgcattattaggaaaaacagaagcgtgggcgagagaatttctagaggagagtacagaagtcgaatctattatgttagctacagtagatgaatcacataaaataaatattttgttaaaaaaatgaaaaatatacgcattttgtcgtttcgtacatatgatacaatagtgtggacaacgaaaaaggaggcgatacggtgggatatgtagaagaattacgaaaaatagttggtcatcgccctttaattttagttggtgctgttgtactcgttataaatgaaaatggatatgttttattgcagcagcggacagagccgtacggaaaatgggggctacctggcgggctaatggagcttagtgaatcaccagaagaaacagcttatcgtgaagtatatgaagagacaggaataaaagtgaagaacttgcgactaatcaatgtattttctggagcgaactactttacaaaattagaaaacggtgatgaatttcaatctgtaacaaccgcctattatacggatgaatacgaaggggattttgttatgaataaagaagaagcagttcagcttaaatttttttcagtaacagaactacctgactatattgtaggatcgcataaaaaaatgattgctgaatatatgaagattatggaaaaaaagatataataatagtgaaagaaatacaaaaacacagctctggttggtagtccagacgcatgatttcatgtcagtaaccttcccctccgggatgtcccgtatttctaatcttttaaaggaggggctgtcaatggatttgacagtatatcacgatggccaattttttgttggaatcattacatgtaaagaaaaagggaaattgtatggagcgaggtatatttttgggtcggaactgtcagatgaagaagtgcttatgtttgtgaatggttcacttttagagcattttcagcactttgcaaaatgtggtgtagaagttaaagaaaaacagcgtcctaaaaacataaagcgtatcatacgacaagcagcaaaagaaacaaatgttaaacgttttactaaggcgcaagaggcaattagtttatcttatgaattgcataaacaagaaaagaaagtgcagtctaaagagaagcgagaagctgaaaaagaaagaagacgtttaatgaaagtactaaaagcaaagcaaaaacatcgtggtcattaaagaaaaggtgttagagcaagagctctaacaccttttctatacttaaatacaagtaaacttacttgtatttcataaacattaactggtaagatacaaataggtagttttagaggagggaaaagagtgattaattttaacttttttatgaatgatgttgtccgccaagcgcgtgaagaaattgtctctgctggatatacagaattgacgacgccggaagcggtagaagaagcgtttaaaagaaatggaacaacacttgtaatggtaaactctgtatgtggttgtgcaggtggtattgctcgtcctgctgctgcgcattccgtacattatgataaacgtcctaaccaccttgtaacggtgtttgcaggtcaagataaagaagcgacagcaagagcgcgtgaatatttcgaagggtacccaccttcttctccatcatttgctttattaaaagatggaaaaattgtaacgatggtagagcgtcatgaaattgaaggtcatgaaccgatgcaagttattgcaaaactacaatcgtatttcgaagagaattgtgaagaactataaaaaataagagaaaaggcggcacatccacaatcaagtggatgtgccgccttttttatttattattaaaattcatgagataatagttatgttattttatgcattattttatacataataagcagtgtttgtattgcttttttatttatttttattttatatattgcataaaaataaaagtgctgatacaatacaaacatcgaataaatattctattaaacttttaaatatacattattagggggaagaaagatgaagaagttagtatcaatatcgtttgcacttattttaattgtaagtatattcagcgcttgtagtaatggggaagaaaaggcaactggaaaaagtgaaaaagtactggttatggggacttcagcggattataaaccatatgaatacgtggaagcttcaaaaagtgatgaaattattggttttgatgttgatgttgctaaatatatcggaaaagaacttgggtatgaagtgaaagtgaaagatatggattttggtggtttattagcatctcttagttcaggaaaagttgatttcgtaatggcaggcatgacgccaactgcagagcgtaaaaataatgttaattttacagatatttattttgttgcgaaaaatatggtcatttctaaaaaggattctaacattaaatctgtagaggatttaaaagggaaaaaagtaggagtacaaacagggtctattcaggaagagaaagcagcagaatttaaaaaacaagtagatttccaagttgagggacgtgaccgtataccagaaatcgtacaggaaattaaagctggtcgttttgatgctgcaattatagaagacacagttgctaaaaattatttagagaaaatgaaagatttacaaggaattgaaattaaagaagcaccagaagaagttggagcagcaattgcccttccgaaaaacagtgataaaacagctgaatttaataaagtaattaaaaaaatgcaagaaaatggagaaatggataaattagtgaagaaatggtttggcagcggaaaataagctgcctttcacttttctgtgaggggaatgaaaagaatgaacttagatttttcggcgattacgccttcgataccatatatactaaaaggtttagaagttactttgaaaattgtagcagtatcagctttagcaggatttattttaggaacgctattagcactttgtaaaattgctagaatacgagcattaaatatagcagcagatttttatacatcaatttttcgtggtacaccccttgtattgcaattaatgattatttatttcggcgtcccacaaataattggttatgaaataccagcattcttagctgctgtacttgcatttagcttgaattcaggtgcatacatgtcagaagtaattcgtgctggtattcaagcggttgataaaggacaaacagaagcagcaatggctttagggataccgtacggaaaaatgatgagaaatattattttccctcaagcattaaaaaatatattaccagcgcttgtgaacgaatttgcgacacttacgaaagaatcggctgtagtaacagtaataggcgcgactgatttaatgcgtcgtgcttacattgtaggcggtgagacatttaaatatcttgaaccattactttttgttggactgatttattatatgttagtcattattcttacattagtcgggaaggcaattgaagggagaatgaagaaaagtgattaaaattgaaaaccttcataaatcatttggtaaaaacgaagtattaaaaggaattacaacaacgattgaaaaaggggaagtagttgcaattatagggccttctggatcaggaaaatcaacatttttacgttgtatgaatatgttagaagcaccaacgaatggtcacatttggattggaacggaagaagtaacgaatccgaaaacgaatgttatgcatgttcgtgaaaatgtcggtatggtatttcagcattttcacttatttcctcatatgactgtattagaaaatattacgtatgctcctatcaatgtaaaaggggtaacgaagcaagaagctgaaaagaaagctgagaaacttttaaaaaaggttggattagtagataaaaaagatacgtatccaaatcgtctttcgggaggacaaaagcaacgtgtagcaattgcaagagcgttagcgatggaaccggaagttatgttatttgatgaaccgacatcggcgctagatccagagatggtgaaagaagtgttagaagttatgaaatcgttagttacgacaggaatgacgatggctatcgttacacatgaaatgggttttgcaaaagaagtggcagatcgtgttattttcttggacggaggaaagcttgtagaagatagtgcgccagaagaattttttgcagcgccgaaaagtgaacgtgcgcgacaatttttacaaaaaatattgtaatatgaaaaggttatgtgaataataagtagaaaaggatgacattgtgtcatccttttcttatactagctgtaaatacgtttatacatataggagtaatgatatgtttaaaattggatatcgtacagtaaaaacagcaatagggacaggtgcggcagtttttattgctcagttattagggttagaattttatagttcagcaggtattttagttattttatgtgtacaaaatacgaagcgcaaatcacttcaagtgtcgttacatcgttttctagcgtgtgtattatcaatggcattcgcgttttgtatttttgaaacgattggctatacaccacttgcaattagcatattgttacttacatttattccgactgcagtaatgcttaaaattcaagaaggtattgtcacgagttcagttattgttatgcatctatattcattgaagcaaattacatggcttatagttggaaatgaaattgctatattaacgatagggattagcgtggcgttattagtaaatatgtatatgccgagtagtgaaaataagctaaaagagtaccaggataaaatagagagtaattttaaaacgattttgtttgaaatggttgtgtatttacgaaatcgagaaagtagttggagtggagcagaactcattgaaaccgagaatatgttaaatgaagcaagagatttatcgtttaaaaaacttgagaatgcatttatgcgagaagatgattattactatcgttattttaatatgcgtatgcaacaattcgaaattttagagcgaatgataccactagcagcttctttatcgtggacatatgaacaagctgacatgattgcagatgttgttgaaaacattggtaatgctattagccctgaaagtactggcgttatttccttaaggcagcttcaagaaatgagggaattatttagagacatgccattgccagctacacgcgaagaatttgagatacgtgcgaaacttgttcaacttgtgtatgaaatggaacaatatttactcattaaaagtcgctttaagggaaaggataatataaaagaacttatatagaaggtaggaattatctatgccgtatcttctctctatcatattatgtctttctttatcaccgatttggcctcttggggataatccacgtgccggagatccttttattattgtaaataaagcaacgaataaattagcttacattgacgatggaaagattcaaaaggtttttccagtagcgacagggaaaacgaatgaattaactccagaaggaacttttgatgttgtaatgaaagcaaaggatccgtattacattgcgaaggatattccaggtggatcgccaaaaaatccacttgggtcaaggtggattggatttaatgcaagaggaactgatggaagtaaatatggaatacatgggacaaaccaaccgagttcaattggaaagtatatttcacaagggtgtataagaatgaagaaaaacgatgtggaatatttgtttgatcgcattccaattggaacgaaagtatggattgtgaaatcgaaaaaatcatttcagcaattggcaaaagaaaaaggagccgtcgcatatgaaaaagccaacgaaaagggtggctttttctattataataagttgtcttgacatgtgtacataaccgtgcgttaatgagagtatagaaagataaagttagataaaggggttgctcatatgtacttgaatccaaaactttcgtatatgcagttttttatgggatttctatttgttattacattcatattggcaacttttaatatatgttcttatcttgtagcgattgtatgtatggcattacttaatctcacttttgttattggggcatttcagcagaaacaatatacaagttttgtaatagcgcttgtaatgtcattttcctttagtattgtagcgattgtgttttatataaaataaaccatctcgatgtcgagatggtttattttgttatgtgtaaaaagtaaaaaaaggacgaacacatcgccctttttaccaaaacatactcgcgccagcaagtaatgttgttacaagcatagaaattagcatcacataaaccataactttttgagcttttttatgcatcgttatacctccttgcaaatcagtacaatttcattgtaacgagaaatgaaattatggacaaggggagagtgaggacaaaattcgggaggggattgcaaaatataacaggaaatttgagagtgtgtagagaatatagtaaaagggtatattgttaatttttagttgggcaagctgaagaatggagatacgatgatgaaaatatacgaaacagatcgtttatacttaagggaaattgatgagtcgtatgctgaaacagttcttcaatattacgacagaaatcgtgaatttttaaaagcttgggaagagtatagaccggatgatttttttacgctagattatcaaaagaaaaagttgcaaaaggatagaaaagagttcgaagaagggaaaatcatcagactatggatttttaaaaagggtgatgatacgaaaataattgggtgtatttcatttaatttaatcgttcgtggcatttatcaatcttgtgtactcagttataaattagataaagcagagttaaacaaagggtatacgacagaagcgcttagaaaagcaattcaagttgcttttggggaatttcagttacatcgtatagaagctccgattatgcctcgtaatttagcatctatacaagtagtaacgaagataggttttcaatatgaaggcgtatctaggaagatgttaatggtaaatggcgtgtgggaagatcatatgcgctgggtattgttaaatgagtaatagaaagcagatggttatctagacatgtaaaccatctgttttttgtcttgtatttcgaaacttttgcgaaattctgttataattaatagtgttacatacataatggtagtgcaggaggcgcagtcttatgattaatcaagaacgtttagtaaatgaatttatggaattagtacaagtagattctgaaacgaaatttgaagcagaaatctgcaaagtattaacgaagaaatttacagatttaggtgtagaagtatttgaagatgacacaatggctgtaactggtcatggtgcaggtaacttaatttgtactttaccagcaacaaaagatggtgttgatacaatttactttacttctcatatggatacagtagttcctggtaatggaattaagccttctattaaagatggatatatcgtatcagatggtacaacaattttaggtgcggatgataaagctggattagcatcaatgttcgaagcaatccgtgttttaaaagagaaaaatatccctcatggtaaaattgaatttattattacagtcggagaagaatcaggtcttgttggtgcaaaagcattagaccgtgagcgtattacagcgaaatatggctacgcattagatagcgatggaaaagttggtgaaatcgttgttgcagctccaacacaagcgaaagtgaacgcaattattcgcgggaaaacagctcacgctggtgtagcgccggagaaaggtgtatctgcaattactatcgcagcgaaagcaattgcgaagatgccacttggtcgcattgactctgaaacgactgcaaatattggacgttttgaaggtggtacacaaacgaatatcgtttgcgatcatgtacaaatctttgcagaagctcgttctttaatcaatgagaaaatggaagcacaagttgcgaaaatgaaagaagcatttgaaacaactgcaaaagaaatgggcgggcatgcagacgttgaagtaaacgttatgtacccaggatttaaatttgctgatggtgatcatgttgtagaagttgcaaaacgtgcagctgaaaaaattggtcgtacaccttctcttcaccaaagtggtggcggaagtgatgcaaacgtaattgcaggacatggtatcccaacagttaacttagcagttggttatgaagaaattcatacaacaaacgagaagattcctgttgaagaattagcaaaaacagcagaattagttgttgcaattattgaagaagtagcgaagtaatggaatagaaaaagcgtgtaaatcaattgtgatttacacgctttttattttgattcgattgctttgacaagacgtataagccaatataagaaaacctatggaagtatatacgttgttgctacatgtactagacgaaggaataatcctaacgtattcatattgaaaatcggaagtagtaaataattaattgcaatgattaatataactacaaggaatgtataattgagtttatcccgctatttgccggacagtaagccccccacctcaaaattcagcgaaagtaaagaatttaggtgagggctgattaaagtttcactttattagttgatctcatcataatcagaccctttcacatatatatcctctttatatcgattataaaaagaacaagtaattattataactattgtgcaaaatttgatataatgaaagaacgaacgttctgattagggagtgagtactatgcgagaaatgtatccgaaaaatggtcgtgttattttacatgtagatatgaattgctttttcgcatctgttgaaattgctcatgatccatcattacaaggaaagccattagcggttgctggaaatgaaaaagagagaaaaggaattattataacatgtagttatgaggcgagagaatacggaatacgtacgacgatgcccctttgggaagcgaaaaggttatgcccgcaattagttgtaaggcgtcctaatttcacattatatcgcgaagcttcatttcaaatgtttcaagtcctttcccgttttacagaaaagatacaaccagtctcaatagatgaaggatatttagatattacagattgctacgcactcggttcgcctcttgaaatagcaaagatgattcaacaagcactattaacagagttgcagcttccgtgtagtatcggaatcgctccaaatcttttcctagcaaaaacagcttctgatatgaaaaaacctctcggtattaccgtacttcgaaaacgtgatattccagaaatgatttggccacttccagttgaagcaatgcatgggattggagaaaaaacagctgaaaaattaaatgaaattcatatacatacaattgaacagttagcgaagggagacgagcatatcattcgcgctaaaattgggaagcatggtattgatttacaaaagcgtgcaaaaggtatggatgatagggaagtggatccgagtcaaatgggccaacataaaagtgtcggtaactcgatgactttttcaaaggatatggatgaagagaaagaattgcttgatatgttagaacggttatcaaaatcagtgagtaaaagattacaaaagcgaacccttgtcagctataatattcaaattatgattaaataccatgataggcgaacagtaacacggagtaagcaattgaaaaatgcaatttgggaagaacgcgatatttttcaagcagcatcccgtttatggaagcaacattgggatggtgattccattcgtttactaggtgttacagctactgaaatagagtggaagacagaatcggtgaaacaattagatttgttttcatttgaagaggatgcgaaaaaagaaccactacttgctgtcattgatcaaattaacgataagtatggaacaccgattttacaacgaggtagtcaactactacgtaagcaagagaagtcgtttcaacaaaagttagaaaataagtttatgtagaaggtgtcatgaagtagtaaaatcatgacacctttcctgtttaactcgcttctaaatttaaagaagtcttccatccagctccagtaacgccagactctaatagcattctacttactattttttcaattaagatagccgcatttgtcttgcaatgtaatgtagcctgtatacaaactttttgattagaatctacatcttcactatacaattcttttaaaccgagcccttctgtacttaccatatgcataagtaaaaaacgaatatgtgcttcattttcttctgaacaagtaagggaaagtaagtagttcgtttgttctggtgattcttcttttgattttttattcataaaaagagcaattgggcgaagaagtatatttgctagtaacacgccagctgcacctaatatagctgcaacgaggaaaccggcgcctgtaagagtaccgacagcagctgcacaccataaagtagctgccgtatttagccctctaatactaaaaccatcgcggataataacgccaccccctaaaaagccaatgccactaacgacttgagcagcaatgcgggatgggctagcatcatgatcaagcatgacggataataaaacaaatatacaggcaccaagtgatacgagagcatttgtccgtaacccagccattcggtgtctccattgtctttccattccaatgcaagctcctacaataattgcgataactaatctgaatacaatgtcgtaccataccatcatggtcacctccatatataatatgtgttatgtcttttagaatgagcggggaatacccactcattcttatttttacaaccagctatgaaactttttaatataaagctttttcaggaattgtgttaaaaaagcgtagcctaatagtattcctactaaccaagggaagtagttaagtggcaatgcttgtaaaccaacggctgcaccaagtggtgagaatggaatataaatcccgattgccataataagagcggttaataaaacgactggtgttgatgcagtgctttgaataaatggaatcttttgtgttcttatcatgtgaacaattaaagtttgtgttaacaatccaacgacaaaccaaccggactggaataatgattgctcgctcggtgtatttgcaccaaatacattccacatgactacgtatgtgataatatcaaatatggaactaattgggccgatacaaataatgaagtttcgtaagtttgcagtatcccattttcgtggtttttctagaaactctttatccattttgtcccatggaatagaaagttgtgaaatatcataaagtaagttttgaattaaaagatgaatggcaagcatcggtaaaaaaggaatgaaagcacttgctactaacacactaaacacattaccgaagttagagctagctgtcatcttaatatattttaaaatatttccgaatgtagtacgtccttctaaaatcccggcttctaatatagttaaacttttttcgagtagaataatatcggaagcttctttcgcaatatcagtagcagtatcaacagatattccgacatcagcttcacgtaatgctacggcatcgttaatgccgtctcccatgtaacctacagtgtgtccatttccttgtaatgcgtgtataatacgagatttttgcattggattaagcttcgcaaatacagtcgtttcttcagcaagttttgctaatgctttatctggtaaagaatcaatctcgtaaccgaggattggttcgccgatatctaatccaacttctttacaaacctttcttgtaacaatttcgttatcgccagttaaaattttcacttgtacaccatgtttttgtaatgcttgaattgcagctgctgcagatggtttcggtggatctaaaaagccgatatatccagcgagaatcatatcagtttcgtcttttactgcgtactctttatcatttattcttctatcttttttataagccacagcaataacccgcataccttcactatttagtgtctcacttagttttttgacatttgaacgtatttcctcggtgagtgggacgattttttcatccacttcagtgtagttacaaattgataaaatttcttctacggcacctttacaaaccattgtatgttcacctgaactatcctttacgatgactgacatacgtcggcgggcgaaatcgaatggaatttcatctagcttttgaaaagctaatggattaaatttattgttttcctctgtatgcttaataacagctttatctattaaatttttcaatccagtttgatagaaactatttaaataggcaaattgcaagacgcgattgcattcattccccttgggatctaagtgacgaacaaggaccactttatcttctgttaaagttccggttttatctgtacaaagaatgttcatagcacctaagttttgaatagaatttagctgttttacaattactttttgtttagacatgttaacggcacccttagctaaattagcagttacaatcattggtaacatttcaggtgtaaggccaacagcgacggcaatagcgaagaagaaagcttcttgccaatctccttttgtgaatccattaatgagaaggacaataggtgccataataagcatgaatgtaattaagagccagcttactttgtttacacctttatcaaagcttgtttctacacgctttccgattaccttatttgctaaagagccgaaatacgtatcggtacttgttgagatgacaacagctttcgcgctgccacttacaatatttgttcccatgaaacaaaggttttccatatcgagtggattgtaattttttttcatgtttgtcggtaagatatgcttattttctgtatgatagcagtgttcgtatttttctacagggagtgcttcccctgttaaagaagattgattaacaaataaatctttagcggatacaatacgcacatcagctggaacgatatcaccggctgaaagggaaataatatcgccaggtacaagttcctcaattggaatttctgttgtgtaatttcgatttaaattcgttacattttttgtttcatgtacaaatccatttattctaaatacgctcgcagttgttcgaaccatagcttttaacttatcggcagctttttgagaacgaaattcttgggaaaaccgaattgttgcactaagtaggaccattgcagatacgacaattgttccttgtatgtcatctgtgaaaaaggaaagggctccaagagctaataaaacgaaaataaatggatttttaaatgccagcagaaattgaatgtaccacggcgccattttattatgagctatttcgttcggaccgtataaagaaagtctacgagacgcttcttgtttagataatccatcttgtgttgtttctagaagttttaacgcagagcttacatcatgtgttgcaacctccactaataattcgttatttgtttgcatgctatcttgctcataagcatgctttgtttcttgtctttgtaaattaaacatcagtagttcctcctctgtcatgaaagaggaaacaatctgttacctaactatttgaaatggtgaggaacagtttctttcctacctacatgatgaaatatgaatgtaaaacgtatgggtatctgggccgaatcatcaattgccaactgttcctcacctccgtacaatttagtagtttctgaatatgctatgtttgtttcatagtaaggtgcatatatacgtaaaaagacctttactcaaaacgagtaaaggtctgaattcgcagttaaaagagtctacaacaaagactgttagtaaacataaataaaaacagtttttgtgtatgacaaaatacatgcacctctccctcgttgagttttagcactgtatagcataggtactgaaaccagctacgttaaaaaaggccttcattccgacctttcctgttgacccattggcgtctctcgacatttttgggcagcagcgtttctctatacaggagcctcacctaacagagaccatattcaattacatgttgatgttagcactgtaaaatcgtagtgtcaatatcttttttatctgtgtttttaaaatattaaatggatttataatagatatatgggatgaaatgcatgatattgattataaataatatggaaaataaatatttttataaaaggggaatttgtaatggtaccacaaaattttattataaatattgagaatcaaaaatggttgtttaatgagcaggaagatttatgttctcatggagaaatatatttaaatatggctggaaccattattacgcaggcaggtatggatgaggaatggggaataagtgaatcagctttagctttgttacgaactttagataaagaatatatttgtgatattaaaaatgaagaggggcttattttgcacggatgtggcactatgctaatgttaggatgcccaatttcaattcattggactataaaccatataagtaaaaacgtgattttaaaggactttgtcaaagttatttctactgatcaaaaggctatatactatgaagggcttcatatagaattgaatgaaaatgaatatagaagacaaattgtttcttttgcattacaagcaaaagaattatttaataaatcaagtgacaagataattttagatgagtttgatcaaaggatgtatacaaacttttggacggaatatgacgatttactaaataagtataaataaaaaagcactgtaaccagtgcttttttatttatagattacgagattgtagggttttcaaaaataacaatctctgaactgtttgtagttgaaacacgttgggcgtaatatgttaaagctgaagaaatatatgctggtaacgtatcatttgtatgtgatgttgtatattcatggattaattcctttaaagttgtccattctaattgtgctgggtgatcagacacgaaagaacttacccagcgatcaaatgaagatgaaaaatcagtttgtaaacgaaatacttctttcataataaaacgctccctcgtatagtatgtttaaacttaatttttttactttcatgagagacctgtaaaatgtgttgaataagtttgttccccgattttatgtgtttcaatcgttccaatctctagtaccttttcaattgcttctcttgtcatagtcattttttatttccccttttcttaattagatttacttttcatataatcgattactaccgtttgcttttcagcaacctgattttgttccttctcttctacttcttctacaggttgtccaacatctgttttcacatcaccctgtagatccatataaaactgtccctggatcccggaagctaactcttgaccaactaaatttccgttttggtccatatctaatagaatcttagactctaccgcttctgttggtgctagtttcgaagtggcttgaacctgacaattccatacatcacgctttttatcaccagcaaacgaaagtgttaaaacaatctttcttgcttttttaggatcagtatttaaatctgccatattttccattacacgctcaaactcttgatgaaatctttcagcaagtgctccatcagcaaatgtatttaaatcaatcatgacttccattatttctctcacctaatccttccttcttaaaattcaacatctacttgaatatcaatgttcataggtatttcttgcgttacacgaattgattttggacttacacctttttgaatcaactttttaacttcttcttttgcagcttcttttgtgtgaaactcactgatacctggaaaacctgcgaaattactagtaatcactaaaatcttttgttgcatgtttgctcctcctactgaacttccgccatatttatttgtgcatttgtagctgtaatttcttcttctaaaataattggaagtgaatattcttcattaatgatttgaatcgctctatctaaatgatgacgtttaatagctttataactactaattccaaactctctatgtaattgactataaatatcgctatacactttttttctaaggctaacatccctataagcattagattccttaccacctaatagaagaacacctaactttcttacaacctttgatacttcatcacattcgatagcatataaaggggcgttttctcttaaatccttcacatcggatttaatctcctgaatttcctgggtatgtccttctaaagcttgaaacgttaactttaaaactcccattggatctgtaggtattttttgttgattttgtatatgttgcttcattcgtttaaactcttcaataaacttgattttcatttgaacagcttcttttgtgttataactcattacaactaatgtaaaagcttcttctgtcagatcgattttaggataacgacgccctctattttcataagttcgctccttaaaattcaggagtgaaaattcataacctgcatactccatttgagttctgatatcagccataacattgtcatgacgtttattgaatacttccgcaatcttcaagctatctgtaacaacttttccgttgttttcaaatactagtgcttgttcgtttgctactgttaattgatccatattactttcctcctctacaaactcggaataactttagttttatccgtattacgatgtaccaaatgcaattcattacttacttttttaaaaatcaaccaattatcaggattcaaattgtatgatttaatatgaaccttttctttttttgttggctttttaccatttttcaattaactcacttcccttttgctcatgtcctttaatttgcagaaccaatatttatcgtcaaatttcgcgaatatgttaaaaaaattatttactttcattttttatatttcgttgttccacttttctttgaatgattaactctcgtgcagctggtattagcggtgttaaaaattccttccactgttcccttgtaaggattactttcaccacatacccattttcatcacgaataatttgtcccccactcatcctcaatcacctcaatgcatctatatgtttgtgggacactaggactatccatttaaatcaaaatttcatgaaacaatattcttcaaattattcgctctctcttgaacgcgttttttcataagtacgaatttttcgtacttaggtccaaaaaatatatcctcataaggaacatcaaataagtacatgtactttttgattaattcatctggaatgtttgttgaatcttgttcatataaccatagggtttttggggatacttctaatatatccgcaagttctgcttgattgaaccctgcactttctctaagttcattcaatgttcttttcaagtaatccattttgttacccccttccttcaatatttattgtattactaaatttatgtaatttcaatacaaaagtacgaaaaaatcatacaaaacgaacactttacgaataattcgtaatgtgttatattaaaaatgtagttacaataggaggtgacggtatgactgatttacaaaaacaaactatagtaaaaaacataaagaaatttttaaaagaaaatgatatgactcaatcggatctagctagtcaaataggaatcgcaagaagtaccttaagcgattatatgaattacagagccaaaccaagttcaggggttttagaaaaaatggctactgtgtttggagtgacaaaatctgatattgatacaacttataagaattcaaaagttgaaattgtagatggagaactccaattagttcaagaaaaacctactgacaatgaatcaaaaaaggaaatccctattattggtaaaatcgcagctggcgttccattggaagctgtacaagatatagttgatagaattgcacctccatacaaaactcacaatatcgatgaattattcggacttgttgttaacggtgaatccatgaataaaattgtccctaacggccattacgccgtactaaaaaaacaacctgatgtccaaaatggagaaatagcagctgtaattgttaatggacattacgcaactttaaaaaaggtgtataaatttacagatttaatgattttagaaccttgttcacatgatgaaagttttaaggaccaacaatactcacaagataactgcgaggatataaagattataggaaagtttttatacagcgtaagtccaatcattcaataattaggcggtgaaaaggtgtatgtagtcggcaagtgtcgactgaatgaaatattgaaagaaaagaaattaactcaagtagatttagcactgaaacttggcatggctaaacaacaaatacattcttacgcaaacaatgacagggttatgtcttatcagaccgctaaaaacgttgcttctcaactcaatattaatatggaagatttatacgaattcattcagtcggaaaaacagtgagtttttctcactgcacctgaaagtcaactacttgattgacctcaattcataatgcaccttattgaaacttatattttcacatagtattcgtctaataaattaaaaatatacataaaatattgattaagaaaggggtttagttaatgaaatgtgtcatttatagacgtgtatcaactgacatgcaagttgaagaggggatttcattagatatgcaaaaacttcgtcttgaacaatacgccaaatcgcaagattggatagtggtaaatgattactgcgatgaaggatatagcgccaaaaatacagaacgacctgcttttcaacaaatgataagagatatgaagaaaaaacaatttgatattattcttgtttacagattagatcgctttactcgttccgtttcagacttacattcaattctaaaaataatggatgaatataatgttaaattcaaaagtagtacagaaatatttgatacaacaaccgctactggaagaatgtttattaccttagttgcaacacttgcacaatgggaacgagaaacaacagccgaacgtgtacgagactccatgcataaaaaggctgaattagggctgagaaatggagctaaagcacctatgggatataacctaaagaaaggcaacctatatatcaatcatactgaagcagaaattgtaaaatacatattcgaaatgtataaaacaaaaggtgtagtaagtattgtgaaatctttaaacagtcgtggtgttaaaactaaacaagggaaaatatttaattatgatgcagtacgttatatcataaataatccaatttatattgggaaaattcgatggggagaggatattctaacagatattgcccaagaggattttgaaacttttatcaataaagacacttggtataccgtccaacaaatacaagatagtagaaaggtaggaaaagttagattgcaaaattttttcgtattctctaatgttctaaaatgtgcaagatgcggaaaacactttttaggaaatagacaggtaaggtctcataacagaattgctgtgggttatcggtgcagctcaagacatcatcaaggaatatgtgatatgcctcaagttccagaaaatatacttgaaaaagaatttctaaaccttttagaagatgcagtcgttgagctggacgcttctgatgaaaaaccagtagagttgagtaatttacaagaacaatataatagaattcaggataaaaaagcacgtctaaaatttctattcatagaaggtgatatccctaaaaaggaatataaaaaagatatgctaacactaaatcaagaagaaaacataattcaaaagcaactcgctaatataactgacactgtatcttcaattgaaataaaagaacttttaaatcaattgaaagatgaatggaacaatttaaacaacgaatctaagaaagcagcagtaaatgcaattatatcttctattacagttgatataataaaacctgctcgtgcgggtaagaatccaattccacctgtaatcaaagttatggatttcaaattaaaataaacacaacctaactgcatttatttaatgtagttaggttgtgtttaattgaccaaaccatggtgtttgaaatgcactgccgccagactgaatcaatccgctcaactgctctttatcaaacagttcgtgtaaaatcgaacctttatccgttaatagattttgaagccatactgttactgcgtttgtatagtgtggattgtgcgttttcggatacggactcttctttctatataagatgtcatgcggaagtacatcttctaacgctttacgtaatagacctttttcgcggtttttatacattttcatttcccaaggaatattccacgcatattcgacaagacgatgatctgcaaatggaacacgtacttctaaacttgcccccatactcatgcggtcttttctgtctaataatgtggtcataaaccataccatatttaaataaaataattggcgtctttttgcttctagcggactttccccctctaaaataggaacttcttgaatcgactcttcataacgcctttgtacatattgttgtaaatttaatttatttctccattctttttttagaagttgttcacgtgcctctgtagaacgcatccatggaaatgcactcgattgtaaatcatcttctctataaaaccacggatatccaccaaatatttcatctgcacattctccagataagccaacgacaaaatcttgtttaatttctcggcaaaaccataataatgacgaatcgatatctgccataccaggcaaatcacgaacaagtactgcttcagttaaatactctgctaatttttcattcgaaatgacgcagcgatgatgggttgtttgaaatgtctcagtcattaaattaataaacggagcatctgaatttggctggaatgcatttgctttaaagtatttgtcattatcttcgtaatcaatagaatacgtgtgtaattgcccttttcccgatctctcatattctttcgctgcaatagctgtaatagcgctcgaatctacaccacctgataaaaaagtacatagtggtacatcagaaacaagctgtcttgtaatagcatcttgtaataaaaagcgcgttttctctactgtttcttcaaaagagtcttcatgttttttactttccacattccaatatctccatatacataaaccgttctttgaaaatgtcatcgcatgacctggacgtaattcttttataccagcataaataccgtggccaggcgttcttgacggtccgagtccgaatatttctgataacccttctaatgttacttccgccttcacatctggatgcgacaatatcgcttttaactccgaaccaaataataagcgtccgctatcatatttataaaaaagtggctttacacctaatcgatctctcgcaataaatacttgttctttctgttcgtcccatactgcaaacgcatatataccgtttaaatgatcgacacattcttctttccattcaatataagaagctaataatacttctgtatcagaatgacctttgaacgtataccctcttcttaataattcctttcgaatgtcttctgtgttataaagttcaccgttatagcaaatggcataattcgtttcatcttttaaacaagtcatcggttgtttccccccctcaggatcaacaacaattaaccgtttatgcccaaatgcgacatttcctttaatccaaattttattatcatccggcccccgcttcgctaacgtctcagccatcttcgtaacgacatctctttctccttctaatgagcgtttataatccacccatcctgtaatcccgcacatataaatcatccttccatcttatttcttttcttgaacgtgcagtaatccccaccctaagagtgcggatcaaaaaataaaaaacttgacgataacctactatccacatatggaatagcattctcactcagtaaaacgtgttttattgtatgcccacctatgtctagatgtgtctagttataaagaacgcacgaactgtctataacaggaataactacttttcataaaggagaaatcgtatatgatacaacgtaaacatattttatataaccagccccgtgctcatacagtcggtaatgtagaatatataaacaatgaatgggtattctttgatgatgaaaatgatgaagcgtttctattagaagatattgccgaagatgggtttgaaattttgtataataacaattggttaccagcccgtttctatgaacaagatgtattacaaatcgccaacgagcaacaccatttgcaaaatggtgaaatggtacgtattcgaaaaaagttacttcttagctataatgaatggctcgaggaattacctgactctgtcttcacattattaaccgaatcattgcaatcacttcactactctttatatgattgcatgtattgtcataattatttatctttcttaccgaaagaggagtcacgcgaaggagtaaatattcttttgtttgataacgacgaaatgatctgtacactgcagcaccatttcgtccgtcacactacgtcaaataaaaatatgttccgttttacgaaagtaaatggagaagagttgcatatcgatgcgacataaaataaaaaaccaccttatctcccaagtctttgagattataaggtggttttatttttatttgaatacgtaccagccaagtggcaatttcagtcctaagtataatactgctactagcgcaacaataaataagccccaaaccgcccctgttggtttgtttttgctcatttttacaagaaccatttccattccgccgataactaaaataccagctaacattttcaagccataccacatgtgcatgctacctgttgctgtcttcacaatactcatgtacaacatgaagcctgtcacaataatgatgatatacattaggcgaagccccatatgtacacccttaccttttcttcctgctgaataaagtgaatacgcaacgaagaataaaattaaacctaacgcccatgctgtaatatgcatatgtaccatcgtatcccttacctcctcttttcacactttttcactctatatgataacatgttcatttattttcaggaaatgtttcgcttttttacatttaaatgctataatatttagagtatttacaaacttcttgtaataacaaaagggggaacaatcatgattcaaactaaggatattatcgaacttacagacacatacggagcaaataactatcacccacttccaatcgttatttctaaagcagaaggtgtttgggtagaagatcctgaaggaaaccgctatatggacttattaagtgcatattctgcagtaaaccaaggtcatcgtcacccgaaaattattaacgctttaattgaccaagctaatcgtgttacgttaacttctcgtgctttccatagcgatcaattaggtccttggtacgaaaaagttgcgaaactaactaataaagaaatggtacttccaatgaatacaggtgctgaagctgttgaaactgcaattaaaacagttcgtcgctgggcttacgatgtgaagaaagtagaagcaaaccgcgctgaaatcatcgtttgtgaagataacttccacggacgtacaatgggttctgtttctatgtcttcaaacgaagagtacaagcgtggattcggtccaatgcttcctggcatcgttgtaattccttacggtgatttagaagcattaaaagccgcaattacaccaaacacagcagcattcattttagagccaattcaaggtgaagcaggaattaacatcccaccagctggttacttaaaagaagcttttgaagtatgtaaaaaagaaaacgttttatttgtagcagatgaaatccaaactggcttaggccgtactggtaaagtatttgcttgtgactgggacaatgtaactcctgacatgtacatacttggtaaagcacttggcggcggcgtattcccaatctcttgcgtagcagcaaaccgcgacattttaggcgtattcgagccaggttctcacggttctacattcggtggtaacccacttgcatgtgctgtttctatcgcagctcttgaagtgttagaagaagaaaaattaacagagcgttctcttcaattaggtgaaaaattagttgggcaattaaaagagattgataacccaatgatcactgaagttcgcggtaaaggtttattcatcggtatcgaattaaacgaaccagctcgtccttactgtgaacaactaaaagcagctggtctactatgtaaagaaacacatgaaaacgtaattcgtatcgcaccacctctagtaatctctgaagaagatttagagtgggcattccaaaaaattaaagctgtattatcgtaatgatagagaggttgtccgacatgttgggacaacctctttctttttatattcatttacattaagataattttgtaattttctgtattttaaaatcgtaaaggaggtgcgatatgctattaagatatggtaaacatattaactatttagctacatcttttattttagttacattctttggcttcctactttccacaacatggcttactcactactcaactcctactacattcacactactgaaagcatcattttggactgctgttattcttactatcattggttttggacgagaaaaaagcgcacttacggttatactatttggcatttgtacacttgcattcattggtctttacactttttccgttattgattacctctataacccaaggccataaaaaagagctatcttttaacaagatagctcttttcttcacttcactacatttcgcaaagtaccaattccttctactgtaataaccacttcatcaccagcatgtaaaaacttcggtggtgtgaaaccttttccgacaccagccggggttcctgttgcgataatatcgcctggttctaaagtcattcctttacttatcgttgaaataatttcttctattgaaaaaatcattttatttgtgttggaagtttgccttacttctccatttactaccgtttcaatgtgtaatgcattcggcgcattaaccaccgatttatgaattaaatacggtcccatcggacaaaatgtatcgaagcttttcccaaggaaaaactgtttatgttttctttgaatgtctcgagctgttacatcatttataatcgtataaccaaaaacatgctcaagcgctttttctttttttatttgcttccctcgcttaccaataatgatagctaattctccttcgtaatctagttcgtccgttgcatgagggtgaccattaatttgctcatttatgccaataactgttgttggtgctttcgtaaaaatcattatattttctggaatagactctattccgcccatttctatggcatgctcacgatagttttttccaacgcacaaaatattctttcttggccttggaatcggtgctaatattttcacctctgttaacggataatacgccgcttccccgttctcttttgcccaatttacaatttcacatactttctcaaagcattcagttcctctttcaatacactctaacattgtaatagggattgtaaccttttcccctttttgtctttgcgcttctcttaagtgtaatacctttttttcttcttcatccacaatacctacaaataccttttcttctttcttcgccgttacaaaacgcaatatttccactctccatcctaaaactcatgccctttaattgtattcgcatccgtaagaaaaaaaccttctcatacacgctaatttttacaatattcttctcataccctattcgttacgcctttatatttggcataaaatgtagaaattttactttttttagcgaaggtatttcttttttatggagtttttgtataatatgtactacatatatactaaaaatttcatttagagatggagccgatttcaatgtttgagcaagcgattgaaaaaaaacgtgaaaaaatgatttattttgctgaacgctatggaatgacttctcaaaaaacagtggattgtagccaagaactggacaggctcttaaatgtaatttggcatgtacatacggattttcacccaaatcaaacactcgacacacacacgcaatagcgtgtgtgtgtcttttatttcaaaaaaacacacattttattgaaaacgcccatacaatagtagaaaagaaaattttaaaaacgaagggtgttttatatgccagctatggtcggacatattcgtatcgtcaatattggatcaagtggtatttttcatattggagatgtatttgcgattaggcctattagttactcacgtgctttcgccggggccggctctttcaacgttggagacaatgtttctgtctacaattatcaaagtgcaacgactgtcaacgattcagatgtaatcgatcaagcgataattggctcaacttaaaggaggcaattgcattgaatttttatgtaaaccaaagtatcatcatcaacagtattaaaattgatagcattacaacctcttctgtgttccaaattggtactgccggaagtattaaagccctatctaaattttcaaatacgggcggatttacggagccgcttcgcccattacaggcgaaaggacaaattatttctatcaaaccatcaactagttcttcttaagacatccttgtcataaatatatagcaggaatatttttaccctccctattgaaaaggaggtttcacaaatgaatcaagatatatatacttacttacaccaacttcaacaagctcttcaaacacaacaagcagccatcctgaatttagaagatcaagtgcgccaactccaagaagagcttaacgaattaaaaaatcgcccctcctcttctgtaggaaaagtggaatacaaattcgatcaattaaaagtcgaaaatttaaatggtactttaaatattggtttaaacccattttcagcaaaaggacaacaaattgaagattttcaagtggatacagaaacattgaaggtaaaccctgaaactgaaacaaacccagacttttatcaaggtatcctccaagaaatgcatcgatacttagatgaagaagcatataatcgtattctccattttgaacaagaagagcgaacaccgcttgatgaaatgtatcgacaaatgatggtggatgacataaaaaaacagatggagcatcgactcccttattatttatcacaagtgcaatcatatgaaggtatttcaacagatccagattatttacgagatatcattattcaggcaatgaaacaagatattgacaaagcctttctctcctttattcagcacataccgggaaatttccgaaaggagtaagtatgtatgaaccttaacgttgtaaaccgtgagttaaaagtcggacagattaaaatgaacggtgtatcgtcgtccgcactctttttaattggagatgcaaatctcctcattctatcttctattctcgatacaccatttgaaacagttacagagggtccatttgtaccattagtaacagatgtccctcctactccaggttaaggagactgagaaattatgttgcatcatgtgtctattgtccaaaatgtttctattatttctttagggattgctgctgtatttcaagttggagatgcaaaccaaatggaattaaaaagtagagctattgccgtccaccgtgaaattcctttttatatacggggagaaggtcgctttgatgcttttgaaatctttacagatgaacacattacaattccaaaacgaacgacagatgtaaaattaaacattgtaaatgaatgcccttttattgaagttaataacgttgaattacgcacacttttaaattctggttgctttcaaattggaaatgttgattatggttttaataactctcgtattatacaaatccgccaatatattacggatgaaccttccgcacaataattcatatagtaattaaaaagcttagtaaagtaggtggatggtatgccttcggttgtaggaaatctcgtcgtgcaaaacagtaacggctctttcaacttaggagatttttataacgtatctccgaaagaaaacacgaaagcctataacggatctggagcttccaatgttgggtttgtcgtgaatacgtttaacggtgttagtgcaacgaatacatttgattctgatgtggcagatcaagatcagattggaacagcgtaaaaaaagtaggagatattctcctacttttttcttttatctaattcaaaattattaaaataaaattttaataagcaagagctttactgtccacaaatagtggtataaacaagtaagtagtgaagaggcactatttcattttatttaaatgataacccgctctcctccaaagccctcctaagcttcggcaaagacgcaggtcccataccatgcagttttaatatttctttttcactatattttgagagttcttctacagtttgaattccatggtgttctaatgcccttcttgctggcgctgaaagaagagagagaaaaccttcttttggttttctctctttctcacagactgggcaagttggacaatcgctacttttatagtactcgtgtccctgttcacaagttcttaacgttttttccgttaccattttcaagcccctctattcttcaatatttacaacgtgattcccatcaaagaagtataaacatttctcttttacaggatgttgtaagcttttctccagtgcttttgcatataacgaaagctgcactttatatcgatcttctaaaattggtttcgcttgttcaaatccgcctggaaatttcccttcaatcgtatctgttttgaagtcgattaacgtaatgccatcttcctcttcaatcatgcagtcgataaccccttggacaagaatcgattccccgctattcccttgccaatcttgatatgcttcttctgctgcaagcatcatcgtaaatggaacttcacgctcaacacttttcgccgctaatacccttttacctaagtcactgtcaaagaatgaaattactttttcaatcgctatttcttccgcctgctcgaatgttaataattccttatttaccattccagcaatttgctcttgaagaacttcaaccgtaatcggcttcttcaaatcaacatgctgcataacggcatggactgctgttccgcgctctgcgtacgttaacccttttttctccataaagcgcggacgtgttttaattggtgcacgtagttttttaataaaggcgttatcactaccatcttctgattgataatttctctttatttctgtaacagattgcttcgcacggtgagatgttgcttcctcatatccgtacttccacattaatctgtcgtacacttcatcttttcgttcactttctaacggcacagcctttttctcacgaagcgcttctaacaattcttgtttctcttcttgaactggctctggtgcaagtagcgtattaccgtccacaacttctactttccagctagtgtcatacccgtaaatttcatctggaatacttccttgtcctaattcaagaagcatttcactatcacggtgtctatataatgaaggggcaatccagtctaaataacaagacgccccggcacgtatgtgatctggtaataaccattcactatgttccctcgcatcaagccatttttccatttccttatttgcatccttaactgttccgattaaaattaacttctctttcgcgcgcgtcaacgctacgtatagtacgcgcatttcttccgcaattaattccattttcattttacgcttaatcgcaagctgtgataatgttgtatatttaattcgtttacgcggatcgataaattgcgaaccgaaaccgaaatctttatgcaataagaaacgtttcattaagtcttgtgtattaaaacgacgaccgagcccagctacaaatacaaccgggaactctaaccctttacttttatgaatcgtcataatgcgaacaacgtcttcttgttcaccgagggccctcgccgtacccatgtcatcaccgcgttctaaaatacgttcaataaaacgtaagaagcggaataatcctctaaatgatgttgcttcgtattgtcttgcgcggtcatatagtacgcgtaagtttgcctgcctttgctttccagctggtaaaccgccaacgaagtcgtaataacctgtctcaccgtacactttccaaattaaatcagaaagtgattgttgacgtgcaaattcacgccatccttgcagtaagttataaaaccactctaatttatcatgaagttcttgctcctcttcaagtggtgccccttttaagaatgagctcattacttcataaaacgagcctttctttccatgagcacgaagcgttgcaagttcttcatcgctcaatccaacgattggagaacgaagtacagctgcaagcggaatatcttgcatcggattatcaataacgcggaatacgttcatcataatatttacttccgtcgcttcaaagtaaccagtcgcaaggtcagcgtacactggaattccttgtaattttaactcttccataatttgcggggcccacggcatggagcgaagtaaaataacgaagtcgcggtattgtactgggcgcatactatcatttttacggtcatacacttcataacctgaatcaaccatcgctttaatgcgctgcgccataagacgagcttcaagctgtgctttttcgacttctgcaccttcttctccgtctattacttcttcttccgtttgctgaatgcacagtagttctgccgctacatcttcaccttctggataggtagcacctaactttaattcagcgtctgcatcgtagtcgatttctccgacttcttcacccataatttgtttgaagataaagttcgtacctgctaacacttcatgacgactacggaagtttttcgctaagtcgatcttcattccaccgcccaatccttcttgtgtgaagcgtttatattttcctaggaatagtcctggttcggctagtcggaaacgataaatcgactgctttacgtcaccaaccatgaacaagtttccttcactctcagaatctttcgttacgaatttaataatagattcctgtacaaagttcgtatcttgatattcatcgactaatacttcagcaaatttattacgatattggagcgccactgctgacggattcatttcaccattttcactttgttcacttaaaatttgtaaacagaaatgctctaaatctgtgaaatcgaccattcctttatctcgcttcatcgcttggaaacgctctgtaaatacttttacaagttgaacaagcttttctaatactgggtgcatatcttgaaaatctcgtaagaaactttcaggttttcggctaaataactcttcttgtaatttcttcacttcatctttcgctttattacgaagagagtctacttgttttacaacatcttcattgtaatcacttttcttaatacgctttaacgtttgccacgatacgttttgcatcgcttcatacaaacttgtccacgactcctgagcagctgatgatagcgttccaagtaaagctacatctgcttgcagggtttcaatgcgaggcgctggaccgtcaggaagcattgcgagttcagttgccttacgaatatgctgttccgctgtttcaagctggaatttcacatcttctaataaataagaagcatatactaaatcttcaattgtctttccttctacgtcatatgcttctactaatttatcaagccatttttccggatttggatgcgctcttgactctgtatgaagcgctaaaatcatacgttgtaagtcatcatcactacggtcactcgtataacgatcaacaagttcaaagaagattgtattatcttcgattccgtactcttcttctaatatgtcatctagcacttcttcttttaacaattcattttctgtttgattcgcaatacggaaacgaggatcaacatcaagcatgtagtaatatcctctaattacttgtaaacagaatgagtgaattgttgaaatggaagctttatttaataggctcagctgctttcttacgtgttgagagcctggttcatcaattaataccttttctaacgcttccccgattcggtttttcatctcttgcgccgctgcattcgtaaatgttacaacgagcaggcggtcgacatcgactggattctcttcattaataatctttttaataatacgttcaactaatactgctgttttccctgacccagctgcagccgcaactaaaatatcacgtccattcgctacaacagctttccactggtcatctgtccattgactaccttctggtttttcaggccaattttctatcattctccgccaacctcctctcttattttctccatcgcttcgctatctttcatatcttttaacgatcggaactgattatcttcaagtgactcatcaaattgacaaacagatttgaagttacagaacgtacatgctgctttatttcccattttataaggagcaatatcgataacaccttctgtaatatcttttccgatattttcaaacgtatggtgtacatatttttgcagtacgttaaactcttgctcacttgcaatacttgaacgcgcactaaagctaccgtcttttttcaggccagcagaaataatatctgaacttcctgttgaaagtttgttatccattaaacgaacaacgtcagcatctcctaatacgagtcctttcattttaaatttctttaaaatttctttttcaatttcagcttcagatgcgtcacctttcatctcaacgattgggttatgaatatggaaatacaatacaccagctggtgatgctgcgtgaccttttttcatccacgtctgcgcattcgaagtaacaacatctaaatacgttaacatttgaagtgctaatccgtaatacacttccgttaaatctaacgcttttgaacttgatttataatcaataatacgtaagaacgtcccgttttcatcttctgccttatcaacacggtcaatacggccgacaacttccatcttcacaccatttggtaatgagaattccatcggcggaagtgatcctgtaccacccataccgaacggcacttctaaatcaactggtacgaatccgcttgacttcgcatgttcacgaagaatgattgacgtacggaaaatgatttgttgtagtttttgttttaaatagaaatgacggtttgaacttaataaaatttgtcgttgtaataacggtgcgatttcttctattactaaaacagaaagatgctcacactcttttatggataaatccgcccaagtacggttttcacgcaatagcttgtccgcaattttctttaatgccgcatggaataattcgccgatgtccggcgcatcaagcttgaaaatatcacgctctctaagcgataaaccgtgctgcgcaaaatgagcgtatgcacaacggttaaatagttccatacgagagacgcttcctttaattatatctccgtataaatctctacttactgctgtacttagtttcttcgcacgatttcgatagaataaacttgataagacgcggctacttttttgtttccattcatctgaagttacgtagaaattatatacgtcccaccaaaagtctaaattcccttcaaatccgtatcgcttccacgtttgtagttgctgcataacgtaagataacgttacttctggcgttgctacgtatgaaatttgttctgaacgtgataaatcgtttacgtcattggtaataaatgaatctttcacattagggaacattctttttattttcttaataaagctagacgcaagtaacgtctttccttcttcatctgcaagcgggcatgaaatatataacttctcagatgctctcgttaccatttgatacataacgaactgttcttctaacaaagtttgtctcgtcgttggcgctaattcaatccctgctgcaccaagaacttctctttcttcatcagaaagcataccttcgtccataggtgctgctggaataacaccctcatttacacctataataaacgttgctttcacgtcagataacctggagtgatcaatattagcaattaacacttggtctaatgacggcggaatgttagcaaattgaagtgcctcaagacctgtcgacataacgtccgtaaacatagaaagagacattttctcttcaccaagcatctctacaaacgtatcaagaaggctcattacttcttcccatacttgttcatgatctgtcgcaaataagaaatctccactttcttctgcacgtatacgtaattcttctagttttttcggaacatccagctcttctagaaataagtaaactgcttcacacatttgcataactgttcctgcacgctttaaccttttttgcatgcgaataacaggtgttcttacaacgtcacgcaatcgatttattttctcttccatttcacgttcactatctgtgatcatcccgttcgtatcatcaagagaacgataacggcgatacatccatggatcctctgaagtccacctctttccttgtacaccgtacgctaaacagtaattttcaaattcatccatttcttcacgcatcgtttcttttcttacgtctaatggatataaaagctctgttttcacgcagcggaacaccgcatcataacgccaattcccactaataatctcgagtgcagaacgaatacattctactaatgggtggtgtgacatcgggcgcttttcatcgatgaagtgtgggatattataatctgtaaataacgttcgcatcacatcgtaataactttccccattacgaagaagaaccgcaatatctcggtaacgatagttttcctccgccacaagtttacgaatttcacgcgcaacaccttctacctctgctcgtaaattcgcagctgtactaatcgttacactcgcttcaccgttaaatttttcattcggacgcgcttcataatgagcttctaaatgcgctaatgccggagaatgaaaacgcggctgttccataagtggaattgttttttcaatttctattttctcttcacgcgctacttgtttgattttttcatacgttaacgtcgtttcataaaataaatcgagttcatttactggctgtgctaacgttttttcatctatcgttaacgtgatcgtaactctcgctccgcaaatcataagctgtcttacaatctctaactcttgcggggaaaatgaatgaaatccatctatataaatttccgcaccatttacatattcagactgcggaagcttttccactagcaattgtaggtagtcttctgaatctaaatattttccaattaaagcacgttcaaaatcatcgtataatagctgtaaatcatacactttattcgctagtaacttttgttcggcactgctactatgcgcatccaattgttgccacatttcatatacgttagatggcgttacattgtaacgtttaaactctgcaatcatactgccaagatgttcaaagaaaccgttttgctccgctgctttttggaacaccgataatccatctttacgagactctacaattttacggagtaacatatgtacacccgcttcatcaatatgaagacgactcgctccgccaacttcttgtagtaccttccacgctaatcgtgaaaaactaaaaacttgtgcccgaatagaacctcttacatcctcacttccaattaacgcctgctgcgtctggaatgtcatctgttctggcacaagatataatattgttttccctctcgggcgttgttttaactcttcttgcacttcgcgtaaacaaagtgtactttttccacttcccgctctaccaatcacaaatcgaagtgacatgtaaccccacctttcacttacataacgaacgttagtttgctactataattgtattatagtacacgaaaaaagacaaactgagttgtttgtcttttctatacttctacttcattatatcaaccttttgaaaaattcgtttgcacctcttgaattggccaatatcgcaaatcaactttaccgacaactgtatcagcttttacaaagccaaagtgtctactatcccagctcccgagccggttatcacctactacaaaaataaacccgggtggcaccagcttttctttcgttaactcttctaatgtaaagtcgcctgttagttgccttccatttatctctttcttatacttctctaaatacggctcatcaataaattgaccgtttatatataacttatcctgcttatattcaatatgatctccaggtaaaccgataacccgctttacatagtcctcttttttattcgcatgaaataccacaacgtcaaatctgttcaagtccccaacttgataactcaccttatttacaactagcatattgccatcttgcaatgtcggcatcattgacttcccctctacaacatacgttgaaaagaaaaacgttcgaaaaaatacagctaataatacaccaattaaaattgttcgtatccactctatgccttcttttttcaaagttttcttcatctgcttctccccttatcctttaatactgaagctttcctttacaaagaagactattcttaatgtagttctaactttacttcgattttcttaccgacataccataaaataaaaataccaatcgctacaataactgatttcactggattatgaataaatgacattaaatcatgaccgatatacgttaaaataaaaatcatcacaagttttccgaatgctaacgctagaccaaactgttttacactaattcgggataaaccagcgacaacatttatgagcgctgacggtgtaaacggaaaacaaaatataacaaaaatcggtgcgaatcctttcctttcaacccaccccattgcttttcgtactctctcatgcttatttacaaacgaaaagaaacgactgcgaccaaaatggcggatgatgaaaaagacaagtaatgcacccattactgatccaagccatgaataaagaaaaccgagccaaaagccaaatgcaacagcattcgccagtacaaatacaataagcggtaatgctggaatcaacgcctctatcatcggtaaaccaataccaagaagtggtccgaacgctttataactctcaacaatatgatccatattttctggtgaaaaatactctttgattgtctgaaaatccattctacactttacccctttactctaaatactatccctactgtatcattgcttatatgaaagaggaaatggtagatacgacatacggagatgtatttattaaagtttccatatctttcataagaattccttcattatttagctatgataatctatcaatattcgacaggacgtgtcgttcattttgttatttagattgtttttcggtttttatcggtaaatgaaattatactggtgattttctaaatatatcaattacaactcgttttttctaatatatcgccttatctacaaagactgactgacaaacaaaaaagaatggggattcccccatcctttcacacttcgccttccttcacaaaatacaccttctcataagcgggtcttaatgttgattcctcttttttatcgacctctttaaaacaaggattcccttgttttttcctacgatcttcatattcagtacgtaatttcgctgtacgattttgttgattttcaaaactagtttttgatatttctaatttcacagcaaagccatttataaatctaataataagatttccatcttctaattctttattactttcaatataaaaatgagacaaccaagcgcactcttttctagagtaagaataggtagggaaaaaataaagttgatctgctggactaatcgcaatcggtgctttatgtgtaatatgagttaactctttcgttccttcttttctgcctaagaaactagagccatgcttgcggcaacttctttctataatatctagaggtttttgaaatacgaaaaaagaatcattcatttcaacgactcgcgtaacaattttcttttcacttagaataacaggaagtaaggccatcgtatttttcgttacaacataattttcgacatagcgttccactttactttccatactccattatctccttttttccatttatattagcagctgcatatataattttagcatctatgaaaaggaaatagcttacaagttccgcttttttacaattttttatcatttatcaaacatttgttaaacaataaaatcacaatatagaaattaattaattttaaagttataaaaacagcatttatactacctataaatatttattatccattcctcatttcacatcattacaacaactaactttgctataattaaaatgtaaatccaatatatggagggccactatggaagaaaaagagattcaaccatcgattcaaatgaaaaatagtagcgtcattatcgtgaaaaactcagctagtattatattcggtttatttttcattctgctattctttgccaaaccgtttcgtaaatcaaaatgtccagaatgtaaaaaacgtgagaagaaaaaatcagggcaagaacaataaaaggccttcctttatggaatgcctttttacatttgtagtatcattttatttattcttcttccccctaaaaaacgactatattttcttccaaggttctctacatcttttttgatttgtaatataatccttatataaaacatgagaaagagtatttgtacttgttacccgcttttaatttttattaaaaaattaaaatttgtacatctttatccatcactaacaattcgttaattagttaactttgcaatataagttttgtatataatgtcattcaaaaacaaaatatatataagtagctatttataattacattgctttttatcgaattctaaaaaggagttgtatactatggataaagaaaatccattaaatcagcaggttaatagcattccctcagatgctctgaatacccctagtaaggaacaagaacaactgttagaaacatcatctcaaaacgtacaaaattccaacaacaacgctaacaaaaaagatgttactcaaggtctatctggaaaagatttctccatttcaacagagaatacaaatttatagttatttactatcatacgcagcaaatgctcttgctgaactaattcttctacagaaactaatacgcattccagataattttttaccagttgtaacatcgaaaaagagatttagatataaaaacaggctctaaaaaaactttctccacaacaaaaaaaggatggcattagccatccttttttccatcatcaactataaaattatagtttgattacgtttttagcttgaggtccacggttaccgtcttcgatttcgaagctaactttttgaccttcttctaaagatttgaaaccgtcagtttcgattgctgagaagtgtacgaatacgtcgttttcgcctggaacttcgatgaaaccgaaacctttttcgttgttaaaccattttacttgtcctgttactgccataattatttcctcctaagaaaatacaaattttaaattttttagtcttcctgtctaaaaaaagaatccacacattatcaaatacgaaacataaactagttctcacatactttttctcgttcgttttcagcacttgataacatatggattgcttaatttaactattcaactgacatcatcatagcacattaaaataaaatgtacaatctttttcgaaaatagaatttctaatttttagtatttcttataaaatataattatctctattctaaataaggaggagtttatgaccaataaaattcctagaaaaacattaaaaagaattgaagaggatattgaaaataataatcttggaaaagcaagagatagattgcatggcctcatctttacatacccaaatgaattacatcttcgaaaacaactcggagatatttattataaattacaatatccagaaatggctggacgttactggtatctagaagagcataaaacaggtattatgcatgaatcatgtttattatttgaaaaatcaatgggaaatagtcctcatcatattgcacgtgctttaaagtttaaaggcgattctaaccatataaaagggttgtataaagatcaacctttatcttcagtgcagaagaaagtagcagaggagttaatttatgagtataaagaaacatggaaagataagctagttccttttggctgtctagcattgcttgcttccctcctcttttctgccgttgttggtctattcactatttggaattggattttttaatcacagggggaattttcacatgtcaaactacgctaaagaagaaaggctaacagggggaaacgtctcaagcgtatatcgttctgaaaatactgttcggcgagagttaaagccaggcagtgaaaagattcataagctattgcaatatttagaaaacaaaggatttcattatgctccaaagtttttaggtgtagatgaaaaggatagagagattttatcctttattgaaggagaagctggcaattatcctttaaaagaatatatgcgatctaatgatgtattaaaagaaatagcaaagatgctccgcctttaccatgatgctgtaagtgattttccgttattagctgattggaaaccgatggatcatactccaaataacattgaggttttatgtcacaatgattttaccatatataacattatttttaataataagaagccagtagggattattgatttcgatgttgctgctcctggtccaagactatgggatatcgcttatacactctatacttgtgtgcctttaagtagagtgtattatactgaatccggtgaagccgttcattatgactcatcgcaacatgcagatcgtattaaagagagagtgaatttgttcgttcagtcctatgataaaaatatggatgaagattacttaggaatggtgttgcttcgattagaagggttatgtacatatatgaaacgaaaagctcaagaaggcgacttgaatttccaaagaatgatcgatgaaggacatctagagcattatgagaaagatatgaagtttattcgtgatcatagggctgagtggagttgatttagtaataaagaaaagttagtatcgttttttgccgacaactcaatctctcttttcgaatcgtttagaaaataacaaggggcacctttcaaaaaggtgccccttccttttatttcataaactgtgcttcttccgtagatccttttaacgctgtcgttgatgaagttccgcctgtaatcacttgtgccacttcatcaaagtaacctgttcctacttcgcgttgatgacgtgttgcagagtagccatgtttttcagctgcgaattctgcttgttgtagttcagagtatgctgccatgccgcgctctttatagccacgtgctagttcaaacataccgtaatttaatgaatggaatccagcaagtgttacgaattggaacttgtaaccgtaagatgcgatttccttttggaagcttgcaattgttttttcatctagtttttgtttccagttaaatgaaggtgagcagttatatgcaagtagcttccctggatgctccttatgaattgcgtccgcaaatcgttttgcatcttctaaattcggttctgacgtttcacaccaaacgaggtctgcgtacggtgcatacgctaaaccgcgcgcaattgcttgatcaagacctgcatttgtacggtaaaatccttctggtgttctttctcctgtaataaatgctttatcaacaggatcaatatcgctcgtaattaaatcagctgcatccgcatctgttcttgcaacgataattgtcggcactcccattacatctgctgcaaggcgtgcagaaattaaattgcgtactgctgtttgcgttggtagtaatacttttccgcctaaatggccacattttttctctgaagataattgatcttcaaaatgcacacctgatgcacctgcttcaatcatacctttcatcagttcgaatacatttaattgcccaccaaatccagcttctgcatctgctacaatcggtacgaaatagtctgtatcatcgcttccttccatatgctgaatttgatccgcacgttgaagcgtttgattaattcgttttactacagcaggtacgctgttcgctggatataaactttggtctggatacatatgcccagaaaggtttgcatcagctgctacttgccaaccacttaagtaaatcgcttttaacccagcttttacttgttgcatcgcttggtttcctgttaatgcgccaagtgcgttaatatagtcttctgtatgaagcgatgtccaaagcttctcagcaccacgacgcgctaacgtatgttcaatatcaattgacccgcgcaggcgaattacatcttctgccgaatatggacgtgtgatccctttccaacgctcatctaattcccagctttcttgtaacttctcgattctttcgtttttcatttgttccatccccttttcattttttataaaatttcataacccggtaatgttaaaaatggtacgaattcatcatttcgaacgagatttgtaaacaacgttgtcgcctcttggaatctccctttcttaaaggcttccttaccaatctctctttctatttttgctaattcttcttcttttaattcttccattaattcaagcgtaatattacgaccatcatttagttttccaccttcatgacgaatccattgccatacttgtgctcttgaaatttcagctgttgccgcatcttccattaagttataaatgggtgctgctccccgtccgcttaaccaagatgcaatatattgaatacctacgctaatattcatgcgaaggccctcttctgtaatcgttcccaccggtacctctagtaaatcgttttctgttacacatatttcttcacgtcttctaaaaatttgatttggtgttttcataatgtgattaaacacttccattgcaaccggtacaagtccagggtgggcaacccaagtcccgtcatgaccgtctaaagcttcgcgttccttatcagcacgcactttttcaaaagctgcttcatttgcttctggattatttttaatcggaatttgtgccgccattcctccaattgctggtgcattacggcggtgacatgtttgaattactttcaaagaatacgaacgcataaatggcgccgtcatcgtgacttgtgctctatctggtagtaagaatttattatgattacggaaactctttaaaaagctaaaaatataatcccatcttccgcagtttaagccagcagaatgatcttttagctcatacaaaatttcatccatttcaaacgaagcgtgaatcgtttccagtaacacagttgctttaatcgttccatttggaatgccgatatatttttgagcaaatacgaatacatcattccataatctcgcttctaaataactttccattttcggtaagtaaaagtatgggccgctcccttttgctaaaagagctttcgcattatggaaaaagtacaagccgaagtctactaagctacccgacatatttttcccatcaacttgcatatgcttttcctctaaatgccatcctcttggacgtacaatgagtacagctgttttctcatttaatctatattctttccctttatcattttcatgtgaaatcgttccctttactgcatctcgtaaattgatttggccttccactgcattttcccaagttggtgaattcgaatcttcaaaatccgccataaaaagatgcgctcctgaatttaaagcgttaatgaccatctttctatctaccggtccagtaatctctacacggcgatcctctaagtcttttggcagcttggcaattgtccaatccgcttcacgtatgtgttttgtttcttctagaaacttcggaaactcccctgcatcaattctcttttgtttttctacacgtttttgtaaaagttctatgcggcgctcattaaaattctcatgtagttccttcaaaaaactaagcacctcaggtgtcaatatttcgctgtacgctggtaacatttctccaacgagtgtaacccgtgaagtttgcgtcgacatattagcatccccttcttaaactgttttataacagatttgatttcatgttttatattatataacaaatcttcagaaaaggaagttttttttgaaaattcatttcgtttttttcaaaacgccattctttcgcgctttatttcatacaaaaaaggccgctgttatacaacaacgacctttttgtattatttttgaatttcactttgactagttaaactttattactgcccttgttccatatcatgcaatattgctctatgtaaaaactgtgcgtattgttctctcgttaccttcatagacggaccgaatttaccttctccgattcccattgtaataccatttgtttgtactgcactaattgcattcgttgcccatgaatttgctgaaacatcattaaagttatgagatcgctttgcctgtaggtcaaaagcattcgtaagaacttgtgccatttccgcacgcgttaacgtcgccttcggtctaaagtttccattctcgtctccctggaaaattccgatttccgttagagccaatatctcctcgataaagcttgttgaattttcatcgatatctccatatgggttttcatattcatcttgttcttccatatcaaacacacggtaaattaaagctgcaacttgctcacgtgttacattatccccaaaaccgaatattccatcgccatatcccaaaattatttcttgttccgctaattcatgaattgcctcatatgcccaatgtccttttggtacatctttaaatacaattgtatttgctttttgcaacggtgcactttccgcttttacactattactctctgctgagaataacaccccacccataattgttaatgctgtagctgtttttaataattttttgctcatcaaattatctccccaatatgtatatgtttttttaaaaatatacagaataaatggtatagtgacaatatattttccgacacatttcgtgacggttttgtgaatcatattacacatcatgtctttttcatcgggttgattataaagcttgtttataatcataaaaatacataaatacgaataataattcttttttaaacaaacaaaaaagcacaaatttttctatttgtgctttcatatttcactctacttccaatcctctttcaaatgataattaataatcgcattattaataaactgagcatattgttctctaggtacagggcgatttaattcatacatgccattcccagttcctctcacaacattattagattgtaacgcactaattgcatcttctgcccagtgaccttttggaatatctttaaatgtatgtttttgtttcgtttcaaaattaaatgctcgttttaaaatgacagccatttccgctctagagattggtgctttcggcctaaaatccccttggccatcccctgtaaaaacaccacgttttgttaacgctaaaatttcctttttaaaagtggttgtactatcagaaacatctttatatggattcgctactggcccttcttcttttatctcaagtgttctgtaaatagtcccagctacttgctcacgtgttataagatcgccaacaccatacttcccgtttccataccctaatataattttatgatacgctaaatccataatagcatcatatgcccaaaatccgtatggaacatcttcaaacacaatcatttgtggatactcttccgcttttacaggtgtcacattcgcccctgcaaatatacctcctgccattgtcgcaatcatcattacacccaatatttttttcttcattatcctctctccctatttcattcaaataaaatgaacttcattgtttcaggagtactattttttttgtgaatgtaagataaaatgcaaatcttctagaagaaatattcccactacctttctgctttatacccccttctttctttttcaaaaaggaagttgtcacatctaaggtgttatatactaaaacattctacaatctctttataaactccttttcactttataacttccctttattggcacctaaaggagatgcctaatggagattactatattcatggtttatatttcagaggtagcatcccccttcactgataactcgctttcgctgaattttgaggtgggggtcttactgcccagcaaataacgggataaaaaaatcatccttttttcttaaaagaggatgatttttttatatttattaacactcaaatatgctactacttttgaagagtaaattgggcaactatttgttttaattttcctgctgcgttatgcatatgttcaattgaaaccgaaatctcttgaacagatttttcttgctgttgaatagactcttttaccctatcagttcggtcagatgatctttgggaaatttgagccatgtcttctgcagaagccgagatttcctcactactcgctgcaatttcatctgtagacatagataccgtttgaatttgctcagatacttgctgtactttttctgtaattgttccaaatactttttctgtatgcattactacttgtgtacctgcctgtacctcattatctactttccccatcatatgtaccgtatggttcgttgttcccataacttgagtaataagattctcaatttgttttgcagaatcactagattgttctgctaatttccgcacttcatctgccacaattgcaaatcctctaccactttcaccagcacgtgcagcctcaattgcggcgtttaatgctaataagttaatctgggaggtaataccttgcataacatcaatgattttaacaatttcttctgattgttctttcatagtctctacttgtttcacaccgctatgtaccgaattttggattgtatccatctgttgaatcatttgtttcattaatttgttaccactctctgcatctaatgctgattgagcagataattcatttacagaggatgatgtattgactatactctgcattccttgcgtcaactcttccatcgcacccgcagtttgttccattgcttgcatttgactctctgcaccatttgcaacttcttcaatatccatagtgattttcttcgctgcactactagatacttctgatgcagatactactccgtctgcatgttggaataaaagctgaatattattctctacttcttgcatatttgttcttagccctgcaatcatctcgttaaaattacttactaatatacctaattcatccttagcagtatactcaccatgtacggttaaatctccttctttcgctctttccatcatacgactaaccgtttgtaaaggagcaactatgagcttgctaataatataacttactatacatataacgattgtagtaactactacaagaatgataaaggtaataacggaacgatcaatcattttttgagaatctttaaatacttggtcagctaaatttgaaacatacgattctagatccactgcataaccagctaactctattcccttcggttttaattccttctgaaattcatttaccatttgtggctcatttgttgccttcgccttttcaaataattttttatatgtatctttataacttggcaaagatttcttcatcttctgaaatagttcatcctcttgcttacttaaattaaaaccatcatcatattcttttaataaagaatcatattttttaagatccttttcaatattatcaattatcccctctttatttgccacttcattttgtgatgccgtaattaattctagtaagttatattctaatgaattttgtgtacgaagcattccttctaataaaattgcagaatattgataatcatctactacaacctctgtatcgtgcttaatcttattaatagaattaattgctacactgctcataattaccatacctaaaactgctaatgaaataagcgctaataatttatatttcacttttaaattttgtaaaaaatacatttttccacctttattcctttatatatagatttttagaattttatagcttattatttacaaaatcgtaataaaaagcaatgataaatattcccaatatgaaacttatatctctataaaaaaagaagtagctatcatgctactcctttttgctttgtttctcatattgttcaaacgtatgaattctttcaaaaattggtgggtgcgtgtataagaaaaattttactaacgcaggcggatttacttggcttaaacttgtttttgataaatattgaaaagttttcacaccagatttcccatccttcgtcatatttaaagcatattgatctgccgctctttcttctatacgtgaaacgtagtttgttgctggttgtgctgcaaaagagaggacagaagaaattaagaaaaataaaggtaaaatggagaaacatgctacttttgaaatttgcaatgtatctccccatttgcgaatacacatatttataatacgactaattaaaaacatacctataaacgatagcaatacataacttgcaacgccaaaatatatatgtttcataacataatgccccatttcatgggccattataaataaaatctctttatcttttaactgcttaagtgttgtatcccacattacaatacgggcgttagggccaattcctgttacgtaagcatttaatgcattcgttttttctgacatatttacttcatatacgtgtttagcaggaatgtccgctttgtctgctatcgctaaaattttcgtttctaattctttatttttcagcgtcgagaagtcgttatacagtggatcaataacgacaggctgtatgaatgttaaaaagattgtaaatggaacagagagcgcccatcctgcgagccaccatctcttcggaaatttacggataagccataatagaacggtaactacgattaacatagtcgcataactttcccaaaaaccgataacatgatcttttatccagctttgtgtactttgtgttgaaatgccgtaatcaacggacactttccggccaatccattgcatcggtaaggcaagcactgttgtcaataatgataaataaaagaaataaatcgcaacttgcaaaacacttattttagtcgtttccttcgaccatttctcaaactttcttgaaatacctagcacaagtacaaataataaaataatccattcaagaggcgtcgctaaaaagtatagtaaatttttcacgcgcgaataatcttggcttagcgtaagctctctcgtactcataaacgtttctggatctgcactcgttcccttatacatgtccggaataagttcatgattccatccaaataaataccaatatataagtaacgcaaatccaacgtacaaaaaaagcgaccaaccgataaccttcttcacgctattccctcctctatgctgcctgtctattattattgtaagttcgtacacgctaaattagaacaagcttattatgtgaattgctctggatctttttatttacataaaaaaactcttctacataagaagagttttacctatctttaaacactttcttcggttcacaatccgtacacttacaaaccaacacgtaccctacttgctttttagataaaataaaaagcctctttaaggaagtacatctattaataaactaaaatcttgtaaagagaaagaactatatttcataataccctgtacagctaaaagtaaaaccagaccgatcacacacatatagttaacgctttcttcattctttttttcagtaaccactccaccacttatacataaaatccctagcaaatggagcgctaaatacatgaaaaaataagcttcctcccagcgcaaaataacattcactgtcgttattaacactagactaagtaaaatcaaataaaaaaacttatttgatgatatcgtttcattcatataattttatacatccctttcaaatttcgaattaatgatgtttcaaagctataaagtaaatgattgtttttataccataaaacaaaaggaaagccaccattactttctcgaatactttatgaatccacatatacttctcttcattctttttgaagatgcgcttcatcatttcttctacaattagaccaaatgttagtaaaaccccgaacacaataagaagagaaataatattttcttttaaatgagtactagaaaatacgtaatactctggaaacacaatcgtatctactacaggttgaagccaatgacaaacacttctatcacacatatctgtaatagacgtagaatctataatgtcttttaatattttttcaaccgtcttcttcatcttatttactcccgactacatctgaaaagctcttttcctgctctgcatatataaccggcacttctttactccaatatttgcgattaacaaataaaaagataagtactaagtttaatcctgttataaaaataataagtccaggaaagaatgtcgtataatttgagaaatcggcaaaactaataattttttctctacttattagaaaagacgcacctattacaaatgcattgtttaacatatgtattgcaattggcatgagtaaacttttcgtacgaatatatacgattgacaatacgatgctgaatatggctgcaccgaggaaatcaacatgtaacaacgcaaacaatattgctacaacgatggtcgctatgctcgttccccattttgttgcaaaacgttgaagtaaaaatccgcgaaaaacaatttccccgataattggtgcgatgaatacgaccctaatgacttgagatacatatcccccagtactatctacaattggttcatgcagggcgttcataataaagtccggtgtaatccatgcaaaactatacatatacaaaataagatacccgtaactaaacatgcataacataaccgtaatgtataaaacttgtaccaagttaaatgtttcatttttattaacaaataatgaaaatgaaatgtggtgctttctatactcataagaaatccataccatcggaaggatatagaatataaggatatttataaaagaagaattttgtatatgaaatatacttgttagcaaatcgccactacttctcgctattaaaattaatagtgcaaatacaattaaaaaatatctagctcgcatcacttgaaacgggttcacactcatctcctcccctatgttacttttatcatatcatttgattcttaattttttgcgaaagaaaaccttaaaatttccttaaaaattccataagttacaaaatgatgatatgatattcgagaaaattaggagggatatttatgtaccaagcaaatattttactcgttgatgatgaaacagcaattttacaattactaactaccattcttgaaaaagaaggcttttctcatattacaactgcaacatcagctgaaatagctttatctctaactaagcaaaacaattacgatttaattattttagatgtaatgcttcctggacaatctggttttgatatttgtccaatcattcgccaacaaacagattgtccaattttcttcctatcagcaaaagcatctgatttagataaaatatccggattttcatacggtgcagatgattatattacgaaaccatttaatccattagaagtagtagcacgtatgaaagcacagcttcggagacatatgaaacaaaccgtaccacacgaacaaaaaccacactcaatttcatttggaagatttgaaattgatcagcactctgcagaactaacagtagatgggcacattgtcgaatgttctgctcaactctttcaactactactcttcttttgcgagaatccgaactacgtattttcgaaagaggaaatatatgaaaaagtttggggagcacctgcctataatggcgatgacaacactgttatggtccacattcgaaaactacgtgaaaaaattgaacacgatccaagtaaaccagaatatataaaaaccgttcgcgggcttggttataagttcgttacaaagtagggtgacgatatgaattttaataaacgacttattattcaatttatcatgcaacacgtttttgttttagttacattacttatcgctgtagttgctgcttttacttatttaatttttcttcttactagtactttatacgaacctaacattccggattctgatagttttacaatttcaagatacatctcttcagaagatgggcatatttcgttacaatctgaagtgcaagatttaataaaggagaaaaatgattggctccaagttgtagatgaaaacggaaaaatcctctaccactttaatacaccaaatgatgttccggatgcttatacgaagacatctttagtcgcatatatacagcatcatatcgaaagcaattataaatttacatattgggaaattgaattagaagaaaagaaagcacttgttatttatggtggtatgttaaaaagcaatgcgttactgacagcaattcaaaaggatcactcctctttaacgatggattcgttcacattaacagatcaagaaaaacagttactgtctaaagaaaaagcagcacttcaaatatttaatcaaaatggcgaagaggttttttcctatccaactggaaagaaaaaaacattttcagcaatacaaatcgcccttaatgaaaaagagccgtggaatcataaagaaaatacgtctagcttttacgatgcaaatagtggcaaccttctcgttgtgactgcgaaaaatgatcactactatccagatgacgaaattgaagatgtatttactaagaagtttctcatcggatgcggattaatccttcttatcgtatttgtttatttagtcattctttctatttggtacggtaataaattcgggaaaccgttattacatgcgatgcgctggcttaaaaatatcgctggcggaaagtatgaagaacctattagtaaaaaaggaaaacctgtcaggttccggcgatctggtaaagaaaaatggtcattccgtttgtttagagatgtaacaagttcactagaacacctttctattacactcaaaaaaaatgatgcgatgaggcaagtcctccagcaaacacgagaagaatggattaccggtctaacacacgacttaaaaacaccacttagctctattatatggctacgcattattactcgaatcggatcaatataactggactgatcgtgatattcagcaatttggtagtgttatgaaagagaaatctcaatatatgacgacattaattgatgatttaagcttaacgtatcaattaaaaaataacagccttcctgcccaacacgtaaacattgaaatcaatcagttcgttcaaaaagtattattgcagtttattaacaatccaacactacaaaatcaaaatattgaattcgtaccgagctcaaataaaattcaatatttcattgaagaaaaatggtttcagcgtattatcgaaaacttactcgtaaacgcggtaaaacataataatgaaacgactaatgtcatcgtaaaactatcacaaaacgctaattcctttacactctccatttcagatgacggaaaaggaatggatgaaaaaacgaaagaacttctatttgaacgatattaccgcggaacaaacacagaagaaagcaacatcggaactggacttggcctagccattacaaaacagctcgttcatgctcataacggaacaatttccgttgatagtgcactcggaaaaggaacgacgattatccttgtatttccgtttcgttcgtaagaaagatgctatgtggcgtctttttttcttttctgggagagttttgcggtaattgaaattatgcagatcgttttttttgaggtgttttagcggtatatgaaattatatcggcgattttttgaatatatcggcgcaactcgaattatatcagcgattttttgaatatatcagcgcaactcgaattatatcggcgattttctagatatatcgacttaccgacaaaaaccgacaatactaacctacttccctactatacaaagtaaaaataacccttcataactcactatgaaaggtcactccatatttcagctatttccctactaacacaaacacattctcatcaggtgcttccattactgcaacatgtcctgattctgttggaaatggttcgcgaatccactttacatctttattatcttttaaactctcatacgtttgttgtacatcttctactaatacttcgacttccgtaaaattaatatccggatgattgcttattactaactccgaacttttctcatctggaaatttcaatcctattaacgtccaaatagctccttcttctagttctctttctatcatccagttttgcttcattcccatttctttatagaaagaaactgatctttctatatctttcgtatgtatagatacacattctagttttttgaacattttcccatttctccttttatgaaaaagcgaaccatctcccaatgattcgctcttaccttattattttttcttcaccggtatccaaagctctacttgtgcaaactcactcttatcttcgtggcaacgctcatcgtacagttcaaactctgtaactccgcaatgttcataccctgaatgcggaaaccattctgagaatactgcattccaagtttggtgaatagacgataccatttctttatgaggaactttcggcgttgtaaatactgcatatgttgctgcagggaaagtacgctttgcaatttcatttggtacattttcaaagtctgtaacttccattccaataatataagtgaagtcccctgtttctaaattaaaatcagtacataatccaagctctacccattggctcgtatctttacgattcggaatcgttgttccaagatctttttgtaaatattcttgccaaaatgctgggatgtcttgatggttcttcccctctttacttgtcgtcttcagttcataacctgccattaaaaattctggtttatttacaatacgatattccatttgtatgcctcctaaatacggatttaattttctttgctttacattcactctgtaatacatcggtgtttcgatttcttgttttcgatattcactcggtgtcatttgaaataattttttaaaggctctcgtgaacgtttcgtgagattgaaagccatgctcaaatgcgatatcaataactttttcatccgtatgagaaagttgataagctgcccgggctaacctcctctttcgaacatactccattactgtatcacctactaacgcctgaaatacacgatgaaaatgcgactcagaaaaacctgcaacccgcgctaaattacgcagcgtttgtttttccattacatcttcctcaatataatcaattgacctttgaatttgtgtttcatagctttccatctctgttcacccgccttatatgtattatgataaaagagaatcctatccaattcttgacgttttttactataattccataaaaaattgtaacttttttatatgtatttcgttgttatgtatgaagggagggaaatgtagtgaaacgcaaacaatcattagaagacatttactccgagcatatgcaagatttatttcgctatcttctctccctaaccggagattcccactatgcagaagatctcatgcaagaaaccttttaccgaatgctcgtccatattgactattataaaggagaagaaattaggccgtggttatttacaattgcctacaatgcctttatcgattggtatcgtaaagaaaagaaatataaaacaacagaagttgcagaattccatttaccaaacgttccaagtacagaacatgaatatttcgtaaaacatgagattgctagttggttagacagtttatcttctcttccgctcgaaagacgaaatgccctgctactacgagattactatggattctcctataaggaaatagcagaaatgactggtctctcattagcgaaagtgaaaattgaattacacaggggacgaaaagaaataaaaaccataaaggagtgatacagatgggctgtgcagaatttaaaaaactatggaagaagtatgaaaatggaacgctcacgcatgatgaacaagaactgttagaaagtcatattgagtcatgtgaagcttgtgaagcttacttagatgagctgttaacaaaaacagaaccaattaagaaaaagttacctccaaaagatcttaaaattcctttttggagaattaagtggaaacatcgtttacaaacgtttggttttatattatcaatttgcatcgttatctatataatcggcggggtattatcagccttttattttcaagctaataatgataaaaggctaaaagaaattagagaggttccttctctggcacttgaagcaactattccaaatagccgcgttatgggaggcggaacaagtgtagaagcttttttccgtacgaatagccaatttgatttagtaagaaccatcggtaaaaaagaaatgcccctcggtacaatagaaacaaaaagcttcttatcatctgtagatatcacgaagcaaacttggatgaatccgttctatcaaccaaaactcttctttgttcatcccaaaacagagcagggtgattatttaaaggattcatcaaaaaaagtatgggatacacttgcaaaagtacatgatggaaccgttgcagaagtagcaatttcttttgataaagcttacactttaaaagaattagaaccgcttttatatagcatattcgaggcacaaaaactccctccaactcctgtatggtacgctttagatacaggacaagaaagaaaaaatgtagatgactatatcctacatggcggagaagctataggatttccagaatatgtaagattcctcgataatgaaactgacgggcagaaaacgcaagaagacaaagtaaccgaaatgatgcgcgtcctttctatccataaaaaaacagtaagcaaaatagcagcgctttctgagaaagaactaaacttagataaacgttatcaatatgtaaaggataacggtgtaaaagtatacggaattgttattactggcccatcgaaagagttattaaaattacaaaactccccgcacgtacgttatgcgactcttggagatattgagatttggaattggtttgattattaataaaaaagaagtagcgctctaaaaacgatgcactacttcttttttaattcgaaatcactttcacatacatccctctcaccgctttttcataagcaatatcactcatctgtcttatgttttctgacacaacagacgactgaacgattttcccttcacgaagtaacggcggatcaataagacgcactttatttttctgatgtaaatcataatcgtttctatcttcttttacctttacatttcgatgaactttgcttaataaagcttctacttcggggtcattacattgctgcaatttcgaaataagctcctcatcttcaagaagaaaatcatctgcatgaataatccttttatgaagagctacctttaacgttttcgctaacatatcatttccgtaaatattcattggttccataaagaaatcgattacttccttgtaatacgtttctgtaaaccattctgccatttcgacactttgaacaaccattttcccatctacagcgatgacatcttctaaaaaactgtgaacttcttctaaagaaacatacccatatgtatacatatctcgtaatgtataatccactctgtctgcgcataattctggtgctgacctttcgagtaacgtccatttcgaatcatctaacaaaatatcttcatagttataaccatacttcgcaagaatcgctggaatttctgagtttttcacaacagaactaaatatctcttcatgataactttcatcttcattatgaaaaacgtaatcaatcacgtgggaaaaagcagtatgcgatacgtcatgcagtaaactagcgatctgttcttctactgaaccacctagttttttcactaacaacataacaccaactgaatgatcaaagcgcgttacattccatttctcgttcattaagtaacttgcgcctgcttgatgaattccctttagtctttgcatagatttacttgaaattaattcttctactacttgatccacttcaaattctccgtatagtacatctaatatgatcacttacaatccccctttattttgatcgagtcttataatcttatctcttttatgaaattagcaccaacataaatatttattgttatttgtttttattaaaaaaaatagagagccatcagctctctatttcataacccctattcaaatgtaacttctacctgcacaatctccgacctactaccaagtctaagcggtggtccccaaaacccaaatccagaagaaacaattgcgtggaacgcgcctttttgtgcgtatccccagtctagctcgtacattcttctcgttacaatatgattgggcgccatttgtccgcggtgcgtatgaccggataataataaatctacacctgccgctgctgcttgtttcaactcaaatggctggtgatccattgcgataacaggcatcgatttatctaccgtactcattaattgttcaaagctttgacgatctcgctctgttttatctcttcttccaacgagataaaagtcatcttcaattgtaattacttcatctaaaagaatacgaatatcaatcttatccatctcttgtaaaaactctggaaccgctctaccgtagtattcatggttccctaaaacaccatatacgcctaatggtgctttcatttgtttcatgattggtcccatattcttttgaatgaacacacctggatgatcatcgataatatcacctggcagtaaaataatatcaggttccatctcatttacatgacgaacaagtctttttaaatgcgaaacgccagacagtttaccgaaatgcatatcagaagccatcgcaatgcgtaaacttttacgcccctctacctttttcggtatgtgcacctcgtactttcttactaccggactatacgcattaaatactccatacgcaaagataaagataaatgcagctatcacagccgcccctgtccaaataattgccgcttctttctctactgaaaactgtaaaagaaagaccataatattagctaatggcaacaacataagcgcatattgtataactgcaaaccaaatcgaacctatcgttcgcagaaatggcaaaaacttaaacacttgcacgagaatgtacgcatatgaaataaatgcaactatgaaagcataatatccccaagattcccagccaaataccgcatgaagccaaacccatccgttccagccaatgtaaaacataagtagtgtgtatataattaacatggtaaatatattgagataacgaagattcttcacagccagcctccttattgatttcttttattataacttgttatgcacttataacgtaaatattaagcacttcgctcatcatagtaaaaacctatagttgttagacttgtatctaacaactataggcaccatttatatcaacattgtttttacaaatgctctttataaaaacttgttaatttttcaactgcaatttttactggttctggttggtcgtataaatcgtaatgactcgcaccttccacaacaagtaaatcttttttctctgaagctgctttctcataaagctcatgaccatctttataagaaccaaatgcaccttgcttactgccgacaataatttgcagcggctgcgttaataacgtatctgctaaatggaacgcatcaaaaccaattaccgatcccatgctcgtaaagtttagcttatttggagagttaacactttgccctcgtggcgttgtgtaatactcaactgcttctacaatatctatatcggtcatacccgctgctactaactcttcctgatttttaggaatccaatttgtaatcagttcctctgctccgcgtgcttcagcagtacgttgtttaccaatcgcctctaacaccccaattggatcagcttcacgatttaatcggccaatatttgcaccaacaactgtgccaactgctttaatgcggcgctctgtcattgcggcatttaccgcataaccaccgcccgcacaaacgcctaacacaccgatacgttcttcatctatataagaaagagtagtcaaataatctaccgctgagcgaatatcttcaacgcgcgcagctggttcttccatatatctcggtgcaccttcactttcaccttgatacgatgcatcaaacgcaagcgttacatagccttgttctgctaacttctctgcatataatcctgccgtttgatctttacagctactacctggatgcacacaaacaatcgctgcattttgtttctttccctcagcacctacaggaatatttaaaatacctgcaacttgtaatcctcttgcataaaaacggacatttcttttcgtaactgccatatataaaaccacccttacttcatttttaatttacacttgtgagagttaatactcacgtgtatatttataataaagcgagcaaccacttgtttcaatgaccacatttacgcatttgggtgataatacacacgtaacgaaatatgtgtatcaataacggaggaacacgatatggagaaaatcgatagaagaattataaaatcacaaaacgccattcaatcggcatttatagaaatgttaattacagatggatttgatgaaattacagttaaaaacattaccgaaaaagcaaacatcggaagaaaaacgttttacttacactatctagataagtacaatttattagataaaattgtggacgatcatttagaccaattaaaagaaatatgctacgagaagcaaaacaaagaatttatagaaggaacaatcatatggtttgaatacttcaaagaacacaaaccattttttgcggcactatttagaagtaacagcaccttatcatttcaaaaaaaattactaactttcatcatgggtgaaatagagaaaaaattaaatacagacacatcagtaaataaaaacatcgataaacatatcgtcttaaaatttttaggaacagctgtaatgggcattttagagtcttacgtgttggatgaaattgatagtgatgttgcgtttgttgcgacgcaagttggagaattgattaggaggaatatataaaatgaaactttaatcagtggggatttattcatcccctacctaacttctttgctttcgctgcattttgaggtgggggtcttactgcccagcaaatagcgggataaaataaaaccgcatcaatttccttaataaggattgataaaatgctattatcgttatccttcaaaactcatctatgcaattatgcataaccatccattccgttttattttcatgttacgatataaatgtaatacgacatatatcgacaaagataaaaggaagtgattgtatgaaacgttctaaaacatacttaaaatatttagcattatccgctgtttttgctagtagtgctataactctttcaacacctgctgcttacgctcaaacaacatcacaagttgtaacagatatcgggcaaaatgcaaaaacacatacgagctataatacatttaataatgatcaagctgataatatgacaatgtctttaaaggtaacttttatcgatgaccctagcgctgataaacagattgccgttattaatacaactggtagttttctaaaagcaaatcctactataagtgatgcacctattgataactacccaatccctggcgctagtgcaacattacgttatccttcacaatatgatgttgcatttaaccttcaagataacagcgctcgtttctttaacgtagcgcctacaaatgctgtagaagaaacgactgtaacatctagcgtatcttatcaacttggtggctctgttaaagcttctgtaacgcctaatggccctagcggtgaagctggtgcaactggtcaagtcacttggtctgactctgtaagctataaacaaactagttataaaacaaatttaattgaccaaacaaacaaaaacgtaaagtggaacgtattctttaacggatataacaatcaaaactggggtatttatacacgtgactcctatcattctttatatggaaaccaacttttcatgtactctcgcacatacctatatgaatctgatgcaaaaggtaatttaataccgatggatcaacttccagcgctaacaaatagtggtttctctcctggtatgattgctgttgttatctctgaaaaaaatacagatcaatctaacttacaggtcgcttatacaaaacacgccgacgactaccaacttcgtccaggctacacattcggaactgcaaactgggttggaaacaacgtaaaagacgttgatcaaaaaacatttaataaattgttcacactagattggaagaataagaaattagtagagaaaaaataaagtgaaaaaacgaagggactatttagactcttcgttttttacttactcataataagatcctgcgagtaataccgtcgctatgaaattccatgatatatttttaggcatctcttcacctttattttgaaaagcaccatcacaatcatttagccatgcttccattgattctaaataatcttctaatgttatattctcccactcatctttattttctttgaaatctttttgaaaataaaacaggaattctactaatttttcttttgaatctacaccattagccaactcataaatatccatattattactcctttcaaatacaagtaaaatcctcgatctcttcaacacaaaaacattcttttttataaaatgctatatttctcttccaaccaatcttctataacatattgtcctgctatccctgaaggatttttaattttcttcccttcttcttcactaaccatttcaaaatcgattaaaggaccatctgctctccctcggcttacaaaataagtcccctgatccttattctcaaacacaaaatctggaagattatactcccccggatcaaacaattccattggtaatccaccaataattttccaatcaccatctaaccaaccagaccaggcagtatacgccgtaaataatacttctttttgattcttgtaatagtttttaaactcgcttatccgtattttttcatctgtaaataaagaaaaatattctatatatgtttccccatcatatggccgcgtaacattttggcctttcactaacatgccgtacccatacttattaatatttttaagatttatcgcaaaaactatccctggcttaaatgattttttgcgacgcttttttaatttaaacttacaatctactacttcttgttcctctaaagaaaaactatcactctgcatttctaatgcattttttaacattatctctaactcatttatatttggtaatctgtgaggcccttcattatatatcttttcaatctcttgaaaagcatccattaaaatatcaatgctttcatcacttataatcaatttatccccttttatttcctctttataaaaagacatattttctctcctttactctcttatacatatcccttgaagactctctttttctttctatcacactaaaacacgcaccacttcttctaataataaacccaaccattcatccaatttgtttcaaaacactctaatacattcagccttctttccatagtactatttcaagatcatactcattctttagaaaagtaaagccacttctcatagatgcatctactacaataaggctagaataaattaatgatctttgagcatcatcatatccaatgaaatgtaatacttcttttatatataacatgaaatcttccaactctatttgcacaccaaagtcccaattttcatgtgcataccatagaataatcttcttagacaataaactagttaattcacgttcaaattcttttatttcattgataacttgttcagcatttaatttactcataactttaataggattcggtgtttcatcaattaaaaagtttactaatgaagcaattttcttcccgctaataatctcaaattcttttatagacggacataacattaaaaacttttctctagtagccttttcctcgaccttttctcttaacattgctattttctttaaacgttcattcacatttatcacctcatacattcagtaaattaacataataaagcgtatcatccgtttgaaaatacataaccgatccacagctataataattaacaaattgaatcggctctccaaaatgttcatagtactttttctgaatgtcacttaatttattttttcgaaaaaaattcatttatgctctacaaccctctttctactatacaaccttgttattaaagatagatttcttctttccaactactggatttagattgaactactattagattttcactttcccattttaaggtacccaaaaatcttgcatacaccatttcatttcctacttcttccaccaatagttgatctcgaatctttaatcccttttcatcatacacttcacatcgtagttggaaacctttaacacgatgaattccttttaatatcgctatcctcttacggcttgggcttttcttaggtgtcttcccaactaaaaatattccttcatagttttgcttcacaatttcatctaaagattcctctatataccctttaacaacagatgatgaaagagtagagttttcttcaagtccagggacaacatattggcgtactaatttgcaaaactctttgtatttctcttcaactgaatttaatgctaaaaagtccataaaatcatatggaacatatatacgaatttcacccaaagctctattcacttcatatgaaatatcagtgttttcgttagctaaacaaaagacagttactttttcaatctctcttaatcccatctcaaactcgctaactttctttgagaaaattagctcaaaaattctaatttcatgtacaagcaaataatgttttttaggacgtttttttttccaatcgtaaaactttacttcaagcaatataattcactcctttaaatttatcaccatgcatcggggacctatgataccttttattaatttattaaactgtactcctttttcattctatcttatctatatttttaatatgctctactcacaacgcacacggtgacataacagccataaatacatcacttctctcacctggtgctatatacactccttctgcatctaaatattcaatggaaaaggctgctagctcatacgccatttcttgatcgcattcaaaaagtggatttataaaaacctcacttcctgtaatcttttgtaaatctttcaaacagttagacttacttcttgcataatcagccacattctcattagcccaagaccacatccaactgttactcttttcagaccaagaacctataaaaacaacactaaattcaagtaatacttgaccattttttttaaactgtaatatacattgatcttgatcataccaatactcatcaaagttatagatattataatctgaaatgaatttttgctgtttactttctaatttgtcataacacataacaagataattttcgaattgttcatccgtcattgccaattatcacacgctcccttccttcaagatctccgctacaaacaatatatcttactctctcaaaacctatataaagtgaaactttaattagcccttaccaattgggcttttaccagtagcccccgcccacatatcatatacgtttctattactaagatatcttaatatatacaaagaaagaagaacttatataagcccttctttccgtaaatagtttctttacttcgtctaatttattttatcacgataaataaattcaacattacacaaatgcaccccaaccatctgtatatccaccaaactcttcacccagtttattcaattccttttgcatctctacaatatcctcataaattaagaacatttctttagaacaagtacacgtccaatcttcaaattcttcattataatctaattcacaatttaagcccagctcttgtagtctgccaattattttttctccattaccttgatcaggaattgcaataaagaaatctactatatgttttttattaaaatctataccttgcttgtataacatatttaatacttgtccatcttcatcttttgggaatttcattatttctccccttttctatagcatataataaaccttcatttggaacaaaaaatattccattacttaaagtcctctttacccgttatttttaagttttttccattctgtatacctaatatcaatcacttcttttaatttaaagtaattttcccaagtatcttgcacttgatataatgtatcacactctaaaaatacatcatcataatcatctaaatataaacctttttcaaaatcaaaataatctattgcaaattgattcccttcatcatttaacatgtcatcgcttaaaaccccatcccagaacatataaacttgagttccagtcatttttctaagcttaaatttattaatttcctcttcagtctcttctaaaaattcatcactaaataaattattatcaataatccaacctaagaacattccagtatgtacaaatgcttgctccatcggtaattcttgtgggaaatctccttcataatgatatttagctttatcgtaaattattgtttggaacaagattctcactcctatttcacataatataattgagctcaaataaataattctttgatacactttttaaaaaggtaagttgactagactctgtggggtttttgcttccaaaggctaagtctatcgctactgctcaaggttacagtgcaccatcatcactcgcaggcactatctcaaaccggctaaaattcgatatgggctttccagtattataaaacctgtaaataaaaacccctataagttacattcgaagtttgtatctaatcataaaaacgtcaaatgtttccttctaggggttaccaatatttatgattaatagaaaatctagagtttaatgtttttccaaccagaaaaaccagatataaacaattaaccccactataatcacgaaaatgaataactaaccttgtttatcctagattcatattagaaagaaagttttcaaataactccaattcaaatttatccctcgtctttaaatactctctctttttctcaatgatttgttctaatatctcttctttatttaataacaaggctaatccaatagcattttgtgctcgcgtcccatcaaatattgtccctattaatccagcctcatcatcatctcttacacataaatcaaatacattttccatatctacatacttatcaatatatggaatgaagtattccttaacttcttttaaaatatccatagtaacaggtaaaatatcttcttccttttcaacacgccaccttttttgctctctatagactaaattccctaaatcaactccaattgtataggtctcctttttctctctaattgttaaaccgtcagcccattgatttttcatattttctaattcatcaaaacgaattcccacatccaccgtcacatcaaaatcttctaggtgattgataaaggctaaatgtataccgatttttcctttatcaaattttttcaccaggtcttgttgtgtagttatagtcttataaccgtcttcttttaactcttcacctagaccttgcagtagctttaattttaattcttttttgttcatataattccttccgctctctattttgatttgtcccacgaggattagatacatgtcctatcctatatataaagaaaaaagagcctatattcgctcttccttcatatacacatttaacaaatgcatctttctaaccactaacttttctggtgatatattaatagcctctaaaagcaaactgaatatacaagtatgtaccaacaccataaataacaaaagcaactatagtaattagccaattttcacgagttttttgtacatacttcgaacatgcccaaaaaagaagtaaaataattaattgaattgcagtcacttttgagacagcaattatagtagtttccgtaacaaatactacccatgtcccgaacaacatccgaatacaaaaaataatcgccccaatacgtgtttcagtatattgtttatttatatttataaaaaatatatcttgcaacataacagttaatgttaatacaactactaaagccaagatagaaatgaattctaaaaattctataagcacttttagtctcccttttgacatcattttattataattttcattaaagattcttactatcatgtaactaggtctacaaataccctctcattatctatacagttttcgcatacataatatgaaaataacagctaagagcataaataataagtgcaatcattgtaatataccactttcctctgtacttctttacacactgcataagcccccaaaggaaaagtaatataattgattgaatcactaaaatatttagcgtccctaacagagtagctgtcatagggtaaatgatccatatactcaccaatgaacgtatagccatgaccgtagcaaagattctcctataatgagacagtcttatactacctatgcagtactcttgtaaaaatacgatagatgctactagcatatttaaaaccaaaattaataaatatccaaaaaactctatcaactctaaattctccttcataaatttatttacgatttcctatcgcatcaaaagttaacaattcactccgaagttttacaagttactttttcaaaaatactagctaatattccaataatcatcaaagagattactattcatacattcattttattactcaaggacgacctatttaaaaatccaattttttagcggacttgaaatagtcttgaaatttatcatcgatgtcctcatctttactaaaaaaaagcgttacatacgaatcccaacaaacaatttcaagttttgcttgagggtgctgaatatttggacttggtacccagagcccttcatttccatttgcatagggttctacaagcaaattattaatatcaatgtttatagacttatcaaacgcagatagtacaccccaaataaattgaggattatatttctttacgagatttgaaagatcttcacctgctatccaaactattggatgcgacattttaggataatctcggataagtttctcttcctgatgtgcgacattctccatgtctgttataagccaattaaactctttttccctaccttgaaatgagtcaaaaacggaagctaaaactgtatatttagatccatgtaaaatgaagttcatccaatccctccaattagtaacaatcgataagttagccttcttgaacttattatgtgtagataattaaacaaataccaatgaatactgttactatacacaatataatagttgttgcagtatctagcaaaatgcttacgactaggaaaattattgatttaagagcaaaagaaggccctttttctttccattgacgatagatttgcatcattgcataaattaatggaatcataccacctataatcagaataatccctattattttccccatgtttcccctccttttaaagattcgaatcaataaatatactatataatcatacaccctcaaaatatatccttatatttttgaagttattttacacatacaaaaccctctaatcatagctacactcgtattaagcgcattgttaaaagttatataatctttcattctgtaattaatggaactttccatctgctaaaaacgttgccatacagcttaacattttctaaggtattaaatttcctaagatatcaattagctcttctaatgctcttcccaaatcgtttatattgtctcgttcatcaaaacctttctccattaattcatcttctataatatctctcaatttatttattttttcagtttctatcatacgtaagtcttcataagcatttaaccatagtaaatgtttattttgtgattctaatgtctgtttcaataaaatctgcatctctttatttaatttaaacaaacttattttttcctttccttatgtattttgaacctttagcaaaagttgtaattactttaccttttttatttaaaactactacagcctgtttactagtatatttagttctaccgccactttgtataacttttttaccagttttaacaacatttaaaatggccttagatgatactcctacaccatcacgactaattgtctataccatttctttcctttcataaactcacctcgctgaaatatttttcaacacaataatgttacatattcaaatctaaatgaaataaagagtaaagtaaatgcagtttaaaaataaatacatctatcataaaaaaagaaaagacgatttcttttctcattaatgcttgtagtatcccaccccatttaatgattgataaaataagaaaagggcttttttggaatcatcggttaaacttgcaatttagttgcagaaggaacaaactgatgatgcggaaaaacgtagtatatagaagactatgtaaggagtttgtcatatgattgataacagaatttcgaaagattatgaccatgaaatagatgattctttaaaagaaattacagatacaaccatcttacttaattttcaaaaagcgattgtaagtttatatcctcatctaataccaattcatgcttttgcctatgacgcatgggatgatattgtaatgccattgttttatgagatggtatataaaacctttgcttttaaatacgggatagatattaactttaaagaaactcatacctatatgttttcgcttaatagttataaagggatacatcacatcgagtgtgttccaaagtgcacgacatttaagatttatattaacgaagaatggattgaaatggataataaaagtttgaaagaaaatgtatttgtatttaagtcatttggggatggattgcattttctaactggtggaattgaaattgcagatgcttatcgtgtaggatttgaccttgttgaggttgatattgtttctaccataacaggtcttccatctaaaacaagtatttttattgataaagagcatgtagactttgtgtttgttgcagaaacatatgatacaaatatccaaaattaaaaattttatgtaagaaagtaggaagaatatcttcattactactcatatcaaatagttgtttgaacacgctccgctattatatatacaaacttcctactacatttcatatgagaaaaagttattacgataaacaaagaaaaggtctcctaaaatatcttttaggagaccttttcttattaatagattttgtaatttaagagtaaacactcttaaattacaaaatcctccggaataaacactttcacttctttcggctgtacgtatacgaaatcacccgcttgaatgttcagctgtttgaactgttctttcgtaatttctgcttctaaatattcatctgtttcgtctcgttttaattctacatatacgatatttccgactgcgtgagaataagatacttttgctgggattgcatctacactttgtttcgtacgagagattgataagtcatgcggccttacataggctattccgtctacgtttgaaacgtgcttatgctctggtgcttctagttcgaccgatcctacatttagctttcctttatgaacgcggccgtgaaataaatttacatttcctaaaaagtcatatacaaacggacttgctggattttcatatacttcttccggtgttcccatttgttcaatgcagccttcattcattacaacgatgcggtctgcaacgtctaacgcttcttcttgatcatgcgttacgaatacgctcgtaatttgaaattcgtcatgtaattttcggagccatcttcgtaattcttttctcacctttgcatcgagtgcaccgaacggttcatcaagtaataaaattttcggttcgactgcaagtgcccgggctagtgcaatacgttgacgttgtccaccagataattgcgctggataacgtttagcaaagccatccatttttacgagctttaataattctgttaccttttcttctatcgcttctgctgacggtcttaagcttttctttcttacttttaaaccgaaagcgacattctcaaatacattcatatgtttaaagagcgcatagtgctgaaagacgaaaccgacttgcctgtttttcacgtgaatgtctgttagatcttccccatcaaatgaaacagagcctccatccgcttcttctaatcctgcaataatgcgtaataacgtcgttttcccagaacctgacgggcctaataaggcaacaagttcaccttttggaatatccaaatgaatgtctgttagtgcttgaaatgtaccatattgctttgatacaccttgaatttgaatactcaccgtaatccccctcttattggcgtttttccattcgccattcaatccagttttttataatgagtgtacacactgcaattaatgacattaacgtcgctactgcaaatgctgctgaaaattgatattcattgtacaaaatttcaatatggagcggcatcgtgttcgtaatgccacgcacgtgacctgatacgacagaaacggctccaaactcaccgatagtacgggcattacatagaatcatgccgtataaaagaccccatttgatatttggaagcgtaacgcgccaaaacattttccagccacttgcgccaagtgataaagctgcctcttcttcacttttcccttgcgcctgcataatcggaattaattcacgtgcaacgaacgggaaggttacaaagattgttgcaataataatgcctggtacagagaaaatgagtttcactccatgttcaagtaaccattcgccaagagcacccctcggtgtgaaaagtaagacgaatactaatcctgcgataactggtgacacagcaaacggcagttcaataagagagagtaatacttgttttcctttaaactgaaactttgtaataagccacgcggccgctaccccaaatatcgtattaagcggcacaacgattaacgcaacgagaagcgttaatctaattgctgaaaatgcttcttgatctgtaatagcggcaatgtatacatccatccctctttcaaaggcttttagaaaaatagttatgagtggcagtaatagaaagagagataaaaataaaactgtaatcgtaattaatacgcctggtacaagcttagattcttttttagctgatacgctttttactattttcttttctaataatgttggttccattttctctcctcctattcactttttagttcatgccttctactccagctttgaatcatattaataagaagaaggaaaaggagggaaataataagcatcacggtcgctacagctgttgcccccgcgtaatcatattgttctagtttcgtcataatcatcagtggtgcaatttctgttttcatcggcatattacctgcgatgaaaacgacagatccgtattctcctaatgctcttgcaaatgcgagtgaaaaaccggcaagaagagcgggaaagatttctggtaaaatgattttcacaaatatttgtaagcgggatgcacctaaactcgaagctgcctcttctacttctttatcaatattttgcagcactggttgcaccattcgaacgacaaatggtaaaccgataaaagtaagcgcaacgataattccgagtggtgtaaaagctacttttatatgaaacagactaaatattttcccaatccatccattttccgcataaagcgttgtaagtgtaataccagctacagctgtcggaagtgcaaacggtaaatcaatgagtccatctaatagtctttttcctggaaatttgtagcgtacgagcacccatgctattaataaaccgaaaatggcatttacaatagcagctgcaaatgaagttgtaaaactaacttgataggaatgcaacacacgctcgttcgttataaccccagcgaacttcttccaacctaactgtgaagtttgaataaatacgatagaaagtggtataagtacgaataaactcatgtacaacattgtaaatccaagcgataatccaaaccctggtaaaacacgtttcttcctcatcctctttcacctcatccccctttagcagtacgcattatttttgataaattttatcgaatacgccgccgtcattaaagtgtttctcctgcgcttttttccagccaccaaatagttcatctactgtaaataattgaactttcggaaattgagatgtatatttttctgctactttttcattacgtggacgataaaagttttttgccgcaatttcctgtcctttttctgagtacaaatattcaagatacccttctgctacttttttcgttccttttttatcaacgactttatctacaaccgctactggtggttctgcaagtacactaatagaaggggttacaatttcaaatttatcttttccaagctctttttgggataataacgcttcattttcccatgcgattaatacgtcaccaattcctttttcaacaaatgttgtcgttgctccgcgcgctcctgaatctaatacttctacgtttttataaatttggctaacaaactctttcgccttatcttcactattattatattttttcagtgcgtatccccacgccgctaaatagttccaacgtgccccgcctgatgtttttgggtttggtgtaatgacagacacaccttttttcgttaaatcatcccagtctttaatacctttcgggtttccttttcgaacaagaaatacaattgttgacgtgtatggagtggaattattcgcaagtcgcttctgccaatcttctgctaattgttttttcttactaatcgcatcaatatcataagcaagtgctagtgtaacaacgtctgcttctaagccatcaataacagagcgcgcttgacttccagatcccccgtgtgattgttttacatttactgtttgcccgtgcttctctttccaatacttcgcaaaatctttattgaaatcttgatataactccctcgttggatcataagaaacatttaaaagctcaactgtttttttatctccacttccttcagaattactagtggatgttgccgaaccacaccctgataaaagtacaactgctgataataaaacacctgtacttttcataaacgctgtcttaccccactttttcatcgttaagcccccttagtttatacaatagaaaaaggcacacaatatattcacaaatgtgaacattgtgcgccttcagtttatctgattagcttctaatgtattctattcgatttcttttcattttaattctgtaattcgcatgtgtcaacttggaatttgaattttcttattaaactaaaatattggcatacgttgagcccaatgatttttcaaatcagcaaattcttttggtaacttactattttcattccattctaatttatatgcatttactaacaccgtagccattgattcacagtccactactccattttgattaaaattaccgttcttatcactttcagagttcatccataatttaacaaataagatattgcacccgacgtaagcgttaatttcttctgttctacgtatgtcccctccttgttggtcatatacaggtttaaatatatggcaccacagcttaatcaatacaaaaaaaatgaggcaaccacctccaaagatggttgcctcatttttacacttgcatcgctttctctctcaatgctcttcttaacaacttacccgtcgtattcttcggcaattctattaaaaactcaatgcttttcggcactttatatttcgctaaatgtaacgtacagtaatgcattagttcttcttctgttacgtttgcttgcttcaaaacgacgtacgctcgcacagcttctcctaagttttcatcaggaacaccgattacgacaacttccgctactgattcgtgcgtatataatacttcttctacttcacgagggtatacgttataaccgccaactaagacgatatcttttttacgatccacgatatagaagtaaccttcttcatccattttcgccaagtcacctgtatatagccagccgtctttcaatgtcgcagctgtatcttctggtgcattatagtatcctttcataacgttaggtccgcgaacaattaattcaccgactgcgccgacaggtacttcttccccaagttcatttacaattttattttctacatgccaaatatttgtgccaattgatcctggtttccgaggacgatctagcggattgaaacaagtaactggtgatgcttctgataaaccgtatccttctgaaacaataacgttaaaacgtttttcaaagttttgcagaagagcaacaggcatcgatgcaccaccggaaatacaaaggcgaagcgtcttcacatcttctgcgcttgcttcttcaaataaatataaataattgtacatcgtcggtacgccagcaaagatcgttggttcgtacgtgcgacaaatacggaatacttctttcggactaaatttcggtaacattaaaatcgttgccccgttcacaatcggtgcatttaccgcaactgttaaacagaatacatggaacataggcagtgccgcaacaacgcggtcatcagccgtatattgtaaatacgacgccacatcgttcgcattactatataaatttttatgtgttaacatagcgcctttcggttttccagttgtgcccgatgtgtatagaataaccgctacatcttcttcatctagttcaggaccttcgtaagttgtatctccagtccccacaaaactagtaaacgttttcattttttcggtttctgtatggttaaaatctgatgaggtttcgcatatgatgatgttttctaatgaaggaagtcttgttgtaagagattgtataacaggtagaaggacgtcgagtacgatgattgtttttacatctccattttgtaaaatataatgcatttcgtctgctgtataaattggattaactggaataacagttgctccggctttcattgttccgtataaaccgaccaaaaaatgtggtgagttcccaacaactaatgcgacattgtccccttttccaatgcccatttctgctaaattgctagaaaaccttgtgaccattttgtttaattggtcatatgagaccgactgatccataaatatataagccggtttttcccccttcttttttgccgtttcagccaaagattgaacgagattcacaaaaaccccacctttataaaatttagaatatttaaaaattctaaattaattatattaaaagaaaattaaagtggcaagtgatattctattaactgcatatagacagatcaccttctcttagtttactttggaaaaataaggggattttatttacaagtaatttataacactagaccaaaaatcattttaggataatatgcactcatcttttctctaagtttatcaagttcctctttatgtaacgtcgtatgctttccaaacaagttaagagcgtccgctccatcttcatgaaaataaactgtaacatataatgccggtaaccctatattgtcttcatctattgataagatgacatctggtgttttattaacagtgctgaatgtttcatttcttttccacttcttattttgaaacatgtcttgtatatcatgtatctttcgtttgttatctgtatgcgtaaaatatataacattatcctcagccggttttccgatagacaaaattgtacgacttgagggcgatccactgttacacgctgtcattccgacggcgaagctgagtaataatacaacgtacattacccttttcatttcgattcgcctccttttgaatatatatattcctttacgaggggcaaatgtcctgtgattttatgttttgtggtaaatgaaattatatgagcgatttttcagttatatcagcgccgctcgatttatatcggcgatttttcaaatatatcagcgcaactcggtttatatcggcgattttccaaatatatcagcgcaactcaatttatatcagcgatttttcagttatatcgacttaccgacaaaacctgacaatctacgcaaaaaagaaagaggctgcccgttatggaagcctccctcatttttagaagaataaatgtaagaaatcttctgttgtaatgttaccgaagtagcgtgcgatatctacgccttctaaagctgcagtgaatgcatctttatcgaactgaacgcctgttagacgctcttcgatatcatgaacatctagtgaaccgaagaagtcgccgtaaattttacattctgttactgttccctttttcacttcaagacgaacgtcaacttgtccaactgggaagcggtgtgaatgttgtaagttgaacttcggtgattttccgtagttccaatcccaattttggtaacgttcttcagaaagtttatggattgctttccaatcctcttctgttaattcatacgttgggatttctgtttctccttcgaaaattgtttctagaagaagttgtctaaactcttctgtcgtcatttcttcgtttaagaactctgtaatgttcgcaacgcggctacggattgacttaattccttttgattgaatcttatccatttttacttttaacgctgatacgacgtgatcgatttcagagtcaaatagtaacgtaccgtggctgaacatacgacctttcgttgcgaactgtgcgttacctgaaatttttctaccttcagctaaaatgtcgttacgaccacttagttctgcatttacgcctaatttactaagcgctttcgttacaggttctgtaaattttttgaagttgctgaaactgtctccatcatctttcgtaataaaactgaagtttaagtttcctaaatcatgatatactgcgcctccgcctgatagacgacgaacgacatgaatacctttttcttttacgtaatctgcattaatttcttctactgtgttttggtttttaccaatgataatcgaaggttcgttaatgtagaacagtaaatatgtttcgttaatatctaaatttttcacacaatattcttcaatcgctaagtttattctaggatctgtaattcctttattatcaataaataacatcgtatcacctcatgagttccatacgtagccactatgcgctagcgtaatgtggccactgaaaatttgttttgcttctgttactaaatcagatgggttgcctgtatgcggtaagtgcgttaataaaagttcttttacattcgcatcttttgcaatacttgctacttctgtactattcatatgccctgcttttgcagcctcttgatgtgcatacatattacactcacaaatgaaaagatcagcatctttcgtgaatggaatgaattcaggaatataacttgaatcagcgctgtatactacagcatcatctccagctgtaatacgcatcgcaaagcatgtaacaggatgaacagtttttaagaacgaaatcgagaatggtccaacttgaagtgtttcttctggattgtacgcgattcctttcgtatgtggttcatgcgttaaagaatggaatccattctcgtcaaaggtatggccgtatattggtaattccggtagttgccccttcgccccgctcataattaatctcgcatattgcaataccccgatatccgcaacatgatcatgatgatagtgtgacagtacaactgcatctatatgagatggtgttatatatttttgaagctgtgctagtacaccactaccacagtctacaagtaaacgaaaaccatcgtgttcaaacaaataccccgacgttgcttctcccgcttctggaaagccgccccaaaagccgacaacagtcattttcatatgtatccatcctttctaaaaccgagtagaaatgcatgttttacttacatcctacattgttaactataatccatttcctaaactttttcattaattttcaattttgttataaaacagttgttgacttttattttttgtactaatacaatgatagtaagaaatggaaatggagggattgacatgatcgatcaaccaatggagtttttcagaaatttaccgacgaaaacttgtgcgcactgcgggaaagaaattgatgagcaacacgaagcataccataacaaatgtgacgattgcgttcacgaagaatagtagtttgtgaacataaaaaaacctagcagacatagtctactaggctaataacatcttatccttcatcgttgaacctttcaccaagagctccagttcaaactcatacaattctttttttcgataatttttcgtatggattttatccatcatcaggtcgacaacttttcgggccatttcatcaattggctgttcaattgtcgtaatacctggttctgtaatctgcgataatatttgattatcaaaaccgataacagcgagatcatctggaatgctccagttatggcgtttcgcctctgagataattccagctgctacctcatcgcctcctgccaaaatcgcggtaggattttttttgtcctttaatacttcatggaatattcgttttccatcttcccaagagaaagcgttttcaagaaagtcaatcgcttctacttggcggctcttctcagttattgcacgtaaaaagcccatttttcgctgctggctaacgactttggtttcgttaccacggcaaaaaataagattacgatatccttgatctaacacatgcttcgcagctatgtatgctccttgcgcatgatcaaacttcactgttggaatatttgcttcctcaatatattcattacacaacacgattggaccgtgctgtaagtatggctctacatcttcccacggattttctagtgaacatagaataatcccatctacttgtttcgtagataataattgtaaatactccatctctttttccggtaaatatcttgtttgacaaataatcagtttatatttatgttcagaagcagcaatctcgattgcttcaataaatctactgaagaaaggatttgtaatccttggaactagcaccgcaattgtttccgttttttgtttacgaagccttctcgccgcagaattaggaacgaagcctaaatgcttcattgctaattgaaccctttttttcttctcatctgaaacatatggatgattattaatcaccctagaaaccgttgtccttgataaccccgctaatttcgccacgtcctctatagtcgacacgaaattctccccctttgcatgaaaacgttttcttaaattgattatatagtatattattggaaactgcaatatcggttgttatgattttactatattaatattatacataggtaaaagtctgttaatgcatgggcaatatactgcttttagaaatttacgttatgtacattccttttcttaataccatatatcctttattcaatataaaaccccatcaatacgtcatctccatatgatccatcttcatactttatttgctttcgttgtctgccttcttctacaaagcccatacgtttgtacactttaattgcccgatcattaacagaaactacacctaaacaaattttctctaaacctttctgccctttcgcccaactaataagaaattcaattaatttcgtgccgatgccttgattacaatacgcctctttaatccccattcccattgtgcctgcgtgttgtaaccgttctagttcatatcggttgaaaattaaaaagccaactaccttcccatctacttcatacacgatataaagattacctttctcattacttttccgtatcttttctctttctgcattcatatcattcggtaacttctttggggatactatgaaaaattttgtagtagtttccgataatataatttcttttctaatattcataattgcttctgcatcagtctcttttactaaccgtatcattaaatcacctcgtactttttcttttgaaaaataatattacaactataaaacgcccaatatgcaatattacatattgagaatctttttactcttgatacaatattcatacatcaaaataaaaggaatgtatgcaatgaatccaatcttaacagctgcaaaacaactattacataaagaagaaaaggttttatctactttaaaatgttcacttactggctatatgattacgcataaagtcccgtatcctggcatgttacttgctactaatcaaagacttctcttttttagccaatataaaaacacattcattgccgaatttgattatgaaaaaattctatccatagaaacgaagagaagaatctttgacaaaaaaataatattttactatgaagatgaatatataacgcttggatacattacaagttcgaatgttgaagcgttcatagacttactacaaagaaacagcaagactagcacaggcttataatcagcggggatcccctcgctgattcattattttaactcctcccacttcgtccaaacttccctcccgtttatacagtacatattatcctctctattcataaacccctgtacaataaattcacgtctaattgtacaaaaatcatcatgatattgttttataaatgtattcatttctttttctgtatattgattttcagcatttaacttgctaattaaatgctctaacaatactagttttttcttcttttgacctggaatcgattttaaacgatcctctttatcgaaaaagttacgaatggtcgtatcccggaatttcatttcactttcagtcattttattgtcctccattaatttttatacaacaaaactttattgtttgtccttactattcttcttcattctttcacttacaacatccataaagtaatacccactaataagcacatagtaaactacaagtattcctagtgcatctttcatatttatatatttttctttatgaaataagataggtgaaagggcgtaaacaagaaagatgattagcggatttaagataaaataataagtaagatttcctttcatcatatcaactcctctattctagttttctctgtaaattgttgtaaatccttttctttcgtttaaactgcacatgcgatatggtgaaattaaggagaaggatgattataaatgatatttcactctaaaattgataaatttttcttattcattatcttttttgctatttttcaccataggtgcttcaacactgcttcctctcttattcgataatgaagctactacgacagacgtatatattctactacctattttctttgtatcttctggtttcctattatggaattccttttcatttttactcctctcacccacactttcttcaaactgacttaccacttttacatttgcaacctattattcaaattaacaaattaaaaatggtaaattatgttacaattaacttatacatactttggagggtacatagtgaaaaaagctattatagtattaagcattctatatcttattttaaccgtacatacaggagctgttcttttaggaaaagaagattatagaagtgctatcaatacattaaaagaaacgaaagaagtctcttcatttcaatctgcaaaagacggtgtgattttattaaaaggagcattaactactgcgcaacctattacagaggaaaaacttcaaaataaagaattcgcactccttgaaattaatacgtataaacgacgaaaagcaaattggataaacattgatacagagcaacatattgcaaagcagctcttactaaataatgaggttcttcctgcattaaaagaaattcgtttttcgatggaaccaattacactgtcaggaaaagatatttccatcgaagattactcactaaaaaaggatgatactcaattaacaattaaaagtaaaggataccgatatacgggaatagaaaacaaatcagacactcttatttttggcataaaaaagggggatacccttgaagggtatagtggttctgaaattctaataggaaaaacaaaagaggaaattgctagtaatatgaaactatatacttttgctgaaaaatatggtccatttatttggattgtagctacaattattcttataagtatcgttatatacttgttccgtaaaaacagaaaaacaaatgaactttctcaaccaatgaagtgaaactttaatcagtgggggtttcttcatcccccactgattattagccctcaccaatcgggctttaatgggcagttgatccccacctaacttctttgctttcgctgaattttgaggtggggtcttactgcccatcattaaagcgggataaaacaaaactaataaaaaaagcaccaaaaaggtgcttttatctacgcttcaaccgattgattttcaagcacatttttaaattttcgtttgtgcatcaaagttaaagaaacgattgttccaaatgataatacaacgataaaaatcatgagtattcctatgtttttccacatgaagtcaaagtctccactcgatacgactgctttcaatcctgatacagagtatgtcatcggtaaccaagcattgaatggttgtaaaaacttcggaatcaattctagcgggaatgttccggcactcgttgtaagctgcataattaatgtgatgatggcgataaaacggcctgcatcaccgaatgctgttactaaacattgaattaatgcgataaatgctaaacttgtaatgatactaaagagtatgaagtatggaatgctttgtacttctacacccaatccgaacagtaatataacatctgctactatcgcttgaataataccaactgatagtaaaacaccgaacttactaataaaccaactaaatcctgattttggaacgcctactgtatcacgtaatgggtatacgatagataataataatgccccaacaaataaaccgagtgataagaaatacggcgtaaatccagttccgtagttaggaacttccgccattttctctgtcttcacttttacaggacttgcaaacatatcatacgttttatccgttccttttacttccccagttttctctgccccttcgccaagtttctctgcaagttcacctgaaccgtcgtttacttttacgagaccatctgttacttttcctgagccatctgctagtttatttacgccgtcgattagctgggttgagccatttgacatttgatttaggccaccatttagagtacctaagcccgttgttacttgaccagatccgtctgctaattgatttactccacctgccatttgatttgctcctacagataatgtccctaaaccgcctgttactttactcgagccatctgctaattgatttactccacctgccatttggtttgctcctgcagataattgacctaggccgcctgttacttgacttgagccatctgctaattgatttactccaactgccatttgatttgctcctgcagataatgcacctaaaccgcctgttactttacccgagccatctgctaattgatttactcctgcagataatgttcctaaaccacctgttacttggcttgagccatctgctaatttcgttacacctacagataatgtccctaaaccgcctgttacttgaccagacccatctgctaatttggatactcctacagataatgttcctaaaccgcctgttacttgaccagacccatctgctaattgatttactcctgcagataattgacctaatcctgctgtcacttttccagagccactttgcaattgcgttactccatcaattaattgaactgatccatcttttaatttatcggcacctatttttgcattatctaatccctcaccaaatccatgaaacttactaacaaattcattttgtgcgctcgttagtttctcaatagcacctgctagagtttttatccctgctggatttggtaagtttttttgcaacccatttgttgtttgatgtatttcaccttttaattgtttcacttcttcatttaatttatttgttccacctgctactccggcagctttttgctgaactgtcgctgtactttttacagcacttgttacgaatggctgtaactgctcttgatattcttttggtaaactttcaatttgcttttgtaaattcgctacctcttgtgctgcattttttgcatctcctgctgttgattgtgtaagttcatttaactgatttacattcgccccagctccatctattttttcatttactgtattcaatatagaaggaactttcgactgcatttcctctaagcctgcagcagacttttgtacgttactatttaactcttgcaatcccttttggatcgcttgagaaccttcctctaattggctttgcccttcaacaagttttcccataccatttgatagatccgttgttcctgtttttaattcaccggatttacttactaatttgttcaagccaccggtcactttctcagatccatcacgcaactcacccgttttactatttaacgtatttaaaccgtctgttactttgcccgatccgtctactaacttcccaatacctgcattgctatttaatgcatgtaaaccatctgttactttgcctgatccatctactaattttccgatacctgcattgctatttaatacgtgtaaaccatctgttactttgcctgacccatctactaatttccctatacctatctgcatttcacctgttttgctatttagtgtatttaaaccatttgttactttgcctgacccatctactaatttccctatacctatctgcatttcacctgttttgctatttagtgtatttaaaccatttgttactttgcctgacccatctactaatttccctatacctatctgcatttcacctgttttgctatttagtgtatttaaaccatttgttactttgcctgacccatctactaatttccctatacctatctgcatttcacctgttttgctatttagcgtatttaaaccatttgttactttgcctgacccatctactaattttccgatacctacctgcatttcacctgttttactatttagcacatttaaaccgtttgttactttgcctgatccatctactaatttattagatccatctgctaatttctgaactccatccttcatctccccagaattcccttgaagtgtatgaaggccatccgtcactttacttgaaccatcatgcagctcacttgatccgtcgtgtagtttatttgctccttccgccccatctgctaatccttttgagacgtcttgaatggaatcaaacattttctctgcatatgttttcgttaacgtgcttgatacttcagttttaatcttttcaatggctgttcctccaatttgtgaagataagaagtttaagctttcgtttggaatgtactctaagtttaatggctttggattgtcttttagtaacgttgtagcgttacttgagaagtcatctggaatgcgcactaacatgtaatactttctagcttccattcctttcttcgcttctttttcacttacgaactcccatttaaaacttttattatcttttaaattatcaacgagcccttttccgacctcaattgatttcccatcaaatactgcgcctttatctaaattgactactgcaactggtaagtcatctaactgtttatacggatcccaaaaagcccacaaaaacatccctgcatataaaattggtacgaataagaccgcaataattggaattaatatttttttactttttataatttccgtgaactctttccgaagtaactgcttccctttcataatttctcccccttttataaaatgaccaaaatgttcatatagtcatttttacccaaacaaaaaggctatacttgttcatacatatgccttatccctgaatttattactatgcaattttttcttattatgattataatttttctatatccccccttaacttaaatatatgaccgaattgttcatttggtcatttttttataaaattaaaaggattatcttagtttgacaatccttttagtaaataaagttcaaataactctgcaattttttctttttctagcggttcgtgatttttttcccaatcaaaaataagcgatacatatagacgaagcataataaatgctgtaatttctggatcacatttgctaatttcacctttttcaatcgcaatctttaaatacgattgaataacagaaacgatttccacatcaacttgttgcatcacttcttgtacttctttcgttcccatatcgcgctcttcttgaattaatttaatcatgagctgatgttcttttctaaattccaagatgctatataatgctctatgtacattttcaaaaaatgaaacatctgaacgaattgcactttctgcaacttgcttcatttctgtaattaaattagaaataatttcaccaaataactcttctttatttttgaaaaaagtataaatcgttcctttccctacattcgctaacttcgctacttgatccatcgttgttgctttatagccgaacgctgaaaaagactttgttgcagcttcaataatagaacgttttcgatctatcgccacattgtcacctccaaaaatgaccaattggataatatagtcaatcagtacatctttgatattaccacacgcttacattctatacaagttctctttttattatttccagtataaaaaaatttcagtcagtgtatatcatactttccatagtttatcagaagaaaagagaaaaggaaaagatgttctagagatatacatcttaagaacacctttttgctatttcaacatagaaagcataattttctctaattcttctttatttacattcttatcgaatactgcttctcctgggttctctaaactatgattaataataacgatttggtatgcacgatttttcccttttgctggaacaatcatcttcataccttgtaaattcctatccgagttatgagtcgcatagaatatttgattaccttctaattcgtactgttcaatattttcttctacaacaaataaaccatggaacggatctttactttctccaaatacttgtgattgataagttgtatagtttccttttccgtttgtatactctaattctataattaactcgggtcttctcttaataaaacaacttaccttttcatcctttagatcgtagccttcaattgtgtaagttggcttcttaatttgaaaatctacatgttcctgcgcttcctttaccgtgtaatttaaagattcttccactttgtcattaaacggttttgattgatcataaagtgcatataatttttcacgatcagtttctgttaaacgttcttccctaaaaaatattgactcgtagtcagaatctctcggagcaccttttttctgtatattaataatttctttatacaattttatgtactgttggaactcatctgttgttaaagccttttcagctaaatataaataatctgtcttattttcatacactcttgctgaatacctatattctttttttgcattttcttctgtaccaaacagcatatctacagcatgttggaaagcatcctttgactgctctactttatccttttgtttttctttcccttccgttgcacgtgcgttgaataaagaaagggatgctatagcaactatgacaataactccaagtaaagaaagacgatacgatttcttttggaattttttaatcataatgattctcctttttagtgttcgtttatttctacttaaatttgccaggcttggtaattgataggaatagtgttctaaaagggtaataattgtatgaccgtatgcaatttgttcctctttatctataaaagtaagtgcatatgcatcacaggctaattcttgatcttctcgcatacaaaaataggcgtaccaaagaattggattgaaccaatttaataggattaaactgtacataatccaatttacagctacatcgtttctcttaatatgagctaactcatggtaaaagacatattgtaattgttgttcatttaatactttcatatgtttttttgatagtaatactttcgggcgaaagaaactaaaaaccgttggacttgcaatctttcctgcaagacgtaatgaaactgccttcttcattttcatagactgcttacagcgattaaacactgtagtgacctgttcgtccgtaatatccggttgtttctttatgtaagaatataaacgtctatttgtaagaaacgtgatggctgctaatatgattaccccagctagccacacatacaaagcaagtttgtataaagaaaatgtagtctgtttttccgaactgacttttacttccggttcgctagtttttgtcaccattttagaatttgattccaattccacttttcggtcgctttctatgttcactatattctcagtagccggcatattttttggaataacttccgatacgctagaactataagaaagtaatgagtaaatgctataagagctatctggcgaccacggtaaaaggagtcttatcattaatacgatccacagcatatattgccaccggggggttaatttatttctgaatagaacttttatacacaaaataaatccgactaatatgctagccataagtgacgtttctataagccaatcaaaaaaatgaggaaggtatacatttataagcgtgtttatcatttttatcgatccttcctcttattctcctctgtcttctcatctaaaatgcgttttaattcattaatatcttctgaagataatttctcctcttttaagaaattaacaagtaatggcttaaacgctgcaccgcaaaaacgctttagtaaagatttcgtttccacttgcaaataattatcttgtgatactaacgggtaataagcgtacatacgccctttatcttgatggtaagaaacggcttccttttgcactaatcgattaattaatgtgcggattgttttcggtttccagtccattgcatcttccagttcttctataatttcattcgctgtttgcggagaattcgaccaaagcactttcataatttctaattctgcttcagatattttaggtaattgatttgtcatagtatatttcactcctaagtattacatttgtaatctataattaagattacaaatgtaatacttaattgtcaaccatattttagaaaaattaatttcagctaaaccttacttaccaacaacaaaattcctctttttcaaataatcaaataaaaaaacaagaaaatctttacaattaatagtaatatagaaaatagacaagtttatcaaaacagtggaggctttttcagtcatgatgcgtgcacttcgtttaaatataaagcaagctttttgtaatcgtgtttctttaattattatgtttagtggactagctcttatttttatttaccattattattatgtaattcgttacattggggatggaacggatgcgtttgtaacaacagcttttaaatggattggatttcgcgacaatgaaatggatgtttatttattattaatgcccgttattgccagtttcccctttagtacaagttacaattcggataaatcagatggttttaaaccgtttgtaagtaaagggatttctttgttcccttattcagtaacgaaatatattgttacattcttttgtggcggacttctttatacattcccgttcatcttatcgttattattttgcaaattaaccattccagacggagaaccgacggctggttcaggcattataaatgataatgggatgtttgcaaacttatattacgaatctcccctcacttacattactgtatatatcggaattaattttttatttgcaggtttaatggcccttttaggacttgctgcatctgcgtggtcacaaaaggactatatggcgattcttttcccatttgcagttgcctccattccatacgtcctgctaaatacgatattccctacaataggcggagctccttttcatttatatgacccaaaacaacctttgcatggcatgtcgccgtatattttgacaatacaatgtgcattcttcctcctcgttagcttaatcatgtatatacaaggagtaaaacgtgataaaaaaaaatatagaagaaggttgcaaaaaagagagcggtgtagaaaagcgtttcaagtataataaaaccctaatttccttactatattggaaattagggttttatttactattcacttacggtgtaccagccaatccccataaaataacaaccgctacaaaataaatcgctttaatacctacaactaaacataatgaaacaattgcatatttacttaattctcttcttgcacctattaaagtgaaaataaccgccaaactaaatgttatataagaagctgctgtatgtattaagttatacgtaatatctagattgcttgtaagtcctgttatatcagctacaaactgaagcatgatgatcgtactaaaaaaaattgcaaactgattcattacctttccatttatttgtaactgcattgttgtcccccttattaaaaactaaatattcaatcaattttatcgttagattacaaaaaaaggaatcatctctttatactattctataacgatgcaaaaaaagaacgcttagtcacctaagcgttccccactttaagaagccttcttcaaatcaatttgagcaagtactgggtcgtggtcacttacacgtccgtgttctttcataatgtttgagtttaagtgtactgggtctacaattgtgtgtggtgcgatgttgtttgttactaaaatatgatctaacacttgtgcatttccttcgtgaatgtacgtgtaacgattctctttcggcactgtgtttaacatatcttttaagattgttccctctagtgtttttagtggtttagagaattcgaaatcgttcatatcacctaacacaacaactggtgcatttgtattctttttctgaattccttgcacgaaataatttacttcttgtgctaactgaattcgtttgtcttcactctttaatacgagcggctgcacttttccaaatggcgttgcatctcctagttttgagtttaagtgatttgcaacgacaacaatgttttgtccttggaacgtaaattctaccgctagcggtttacgtgtactttcaaacaatggattttcgtctccaatacgaacaacattcttatcaagtaacttcggtaccgtcgctaatttcacgcgtgatggattatagaagaagccgacgcgaatattcgctcctggtgctcctccatcttgattattgtttggagcgatttctacatactcatacttcggtccacgaatttctagaactgcatcaatgatacgttttgcgcttaatgacgcatctgttgtaccgtcattaattgatccgttattatcttgcatttcctctacaccgataatatctggcatttttaaattgtatttaatagaatacgctaacgcttttactttttcatctgttgtttcttttttattcgccgagaagttttcaatgttatatgtagcaaccgttaacttatcaagacgtggctgaatatttgcccctacttgcttaaatccaccatccactacagctggcagttctgttattggcgaaatacggaaagaaccgtaatcatatcctactacccctgttatatctccagtaaaagtatctcctacttttgctacataatcgcgaggtacttttacagaaaggcgctctgggtttaattgattttcatctaatagaggtgtgccatattgtgttactattttatctccaccattttttactgttacatataaatttccgtttttctgaggtgtaataatttttggtgttggcatcgtaacacgcataccttctatactttcatagaagtcgattgcatcttcatttggatcaaataaaccaaatgcatcattatcaataatctggtccgggattttcacaccgttttccccaagtacaatcggtgctggcaaagattgatcttttgcgattacagcaacgcggctcgctttaatttcagtcgtcgttaagtctgtttcaaatcgctctgcatatcctggtccaacatattcttctactactccatcaacttgaataagatctcctactgctacattcacatcttttttatatacgtacataccttctgaagtagctgggtcattatctggctgattatcttctatataaaagccgtttttatcaagcgctgtgacaacgccttccacattgtttactttcttcccgttgtaaggagacatatgtgatttcccttgaatgtcatgaatacgaacctgttcattatttacgataataaatgaaaatgtcgaaattgctgaaggagtaagtccttctttttctgcgattgctttcactacactattttcattgactataatttgtccattataacgaacgcttttattagtaggattagagccatctaacgtatagtagattgttgcgccttctgtattcgtcgttaatgttaccgctgttcctttagcaacttctccaccgttcggtgaagctactacatcgctaacacggttttgtccttcaccttgaaacttataagctgttactgattttagacctgggttactaaaatataattcaagggtcccagtcaaactaactttcttcccgatattttcagggtgatcttttacattcactgccgttctcacatcacctttcggtaactgaacgggcatgattttgtctggattcgtttcgtttggcgaatctgcaattgctacgtttgtatcatcaaacttagctggatccttcgtatatttagaagaactttgcgtatatccaacaatatatccttctactatccccttcgttttcccttgctgcttaaatacttgaattgctttttctactgacatagaagcagtttcttctgcttgcgctaaagttccagtaaatgaaagcaatagcaagaatgataaaaagacacttaacaatttcttcacagccattttcctctctctatttcatattttctcagcatttctatcataacaaatgattcgttatatagaactatatttcgacaaattttacaaaagatttatttaatttacaagctttcaaactataatacaaaataataattttacaccttctacaaatacactctataatgttagagagaaaacagaaaatatcgaaagtttattggcatgtaaaatggattcatttgaataggagtgattggatggaagtgcaaacagaaacataccgcgcagctatgaatggaacattagaacgtcatttttcagatatgattgccgttataccaactagaattacaattgagcagttaaaacagcgactagaaacgatcgctactaaagttgatgatttaaaaattgtttatagtgatgagacaagccttattgttgaattacatatgggtgaaacagtcataccgtatgaactgcatattgatgaaccgaacgatccagaaggatataaaatgtacaatagacaagatgctacaatcgtagatcgtaattttgaagatgcagctttcggcactgaaattttcactcgtacgctatttgtaggcgatgtactggactgctttttccagcagttacagttcttatggaatctcgccccagatttgttatttgtaatcgattcaagtgcagcaatgaaagtgatatctagaagctatattgaatatcacgttgaaaatgaattattacctgacattcctgacttatacgttattcattccatttatgaagacgataaagacggtgagcctacgcaatattggtttcatacacacggtcttttaagagcaggcgtaactgaaatagagttaattattccaaatcgcatttcttcctactacggcattagcgatctctttcaaacatttgctaataatgccgttgagaatggacaagtccctataaatgagcctatcgttatcgcacatagtcagcaaggttctatacatacagtcgctgttccgtgggaaaaaggattatcttatatagggcataaaacgagtatggaccaattatcttcaatcgaggatgaagaagtgaaactacaaccaatagatgcacaaaatacattcttaggcggtatggatgaccgagatgaataccatcaatctccatctgttctcttattcaaatttaatacttcagaagaatatattgaaagctttttccaagaacacgaggaagctacagggctcatgttctataaaacaaatagtgaaactgatcgtatggcttacaatgcgaagaatactttcgggtatttcagcaacatttttcacattgaacaatcaaatgaagattttcgtttccttgctaaatttggtgtatcctacgaagagggaaaaagtgaacatatgtggtttgaaatgcaaaacattacggaagatttcattcaaggaatactcattaatgaaccatattttatagaagatatgagtgaaggaaatagttatcatttagattttgataacttaacagagtgggttatttatgcaggagatgctgttataaagccaaataacttatatatgtttattggcgaataagtattttatataataaacgaaacgccttcaatatgattgaaggcgtttcttataatttattgtgcgattaattcagcatctattactttctccaaatgagataatacacgctttgcagcttcctcaccttgattaatacagtctggaagtccagcgccagcataggagctacctgccaagtatatacctggcaactctttctccataaatgttgtgagctgtttcattcgctcgttatggcctactgtatattgaggcatcgcttctttccagcgacttacaattgtaaactctggatcctctgtaatgtccatcgtcttctttaaatcttctagtacgagctgaacgagttcttcttcagtttgttctacaaccgcttcatcaccagcacgcccgacgtagcaacgaaggagtgtttttccttctggcgttgtatgcggccattttttatgcgtccacgtacatgctgtaatggtgtaatcgctatttcgtgatacgacaaatcctgtaccattaatatcacgctggattgcagacttttggaaagcaagtgccacatttgcaacggatgtggatggaatattacggaagaaacgaaactgcttgtactgagcaaacatggacggcaatactttatgcgaagttgccactacgatggcgtccgcttctatttcttttccgttactaagagtaattgtataaccatcaccctgttttgcaactttttcaatgcgagttccctttattatcgtaccttcatgcatctttacttcgagagattttacgatagattctaaacctgttttcactgtttggaacattccctttttcggttcagctttctcttctttcggagcgagcgtacgcataccgagtgaaatactgcgatgtttctgctcaatctgatacatttgcgggaatgttgacattaagctcatttgatcaatatcccctgcataaatacccgatagtaacggttctattaagttttcaaccacttcgtttccaagacgatgtctgaaaaattgtccgagtgattggtcagatactggctttgacctcggcattaatagatcaaaaccagctcttagtttaccaattggggagaacagcccggaaaatagaaacggcgtaatttgcgttggaattcccatcattgatccagtcggcattttatgtaaccgattgtttacgaggataaatgattgaccagcttgattatttacaagttcatcgccgagacccaattctttcactaatctagctgcactttcttttcgtgctaagaaagaatccggtccgcgctcaattgtaaacccatcttttcgaacggtttgaatttttccgccaagtttacccgatgcttctataagtaatgtatcaatcggcaagtttttttcatgaatatttttttgtaagttatacattgctgttaatccagtaatacctccgccgacgatcacaacttttttcctcaagcaggctccccctttcttcttacagtacagattcttttttctttaatacaacatctgttaaacaatcaataaatgcgtccgatgcatttggcatttctggacgataatatttcgcaccaatttcatccgttacaactttacactcaaagtcgttgtcatataaaacttctaaatgttccgcaacaaatccaactggtgcatatacgaatgaagtataaccgtgcttttcatttagttctctcgttaaatcttgtacatctggaccaatccaaggatctggtgtgtttcctgcactttgccagcctactgcatagtttgctacttcagctccgcgcgcgatataatccgctgtttcatttaattgatctggatatggatcgcccattgcaataattttctctggtaagctatgtgcagatacgattaatactgctttttcacgctctgcatctgacataccgttatatatacctttcactgcatcaacccagtactggatgaatttcggctctttataccagctatcaatgccgtgaattgttaagtttccaagtttctcagcttcttcttgtgctcgtccaacgtatgatttcacgctaaacgtagaatagtgaggtgcaagaacaagtgcgattgcatcttgtattccgtcgttatgcatatctttcaccgcatcttcaataaacggttcaatatgttttaaaccaagatacatatggtactctacttcatcttgtacttcatttaaacgctgttctaacttcttagcttgctctaatgtaatagtagctaaaggagaaataccaccaattgcacggtaacgctctgttaaatcttccagcatttcaggacttggctttcttcctctacgaatatgtgtatagtaacgttcaatatcttcttctttatatggcgttccgtatgccattacaagcaaaccaattttctttttcatacagcaattctcctttacttcgctaactgccctttagagtattcatgaataaatgtagttaaacgttttaatgtatccggatttacttctgggaatacaccgtgacctaagttaaagatataacccggctgtttcatcccttgatctaaaataccttttacatgttcttcaataacagaccatggtgcaagtaagaatgaagggtccatattaccttgtaccgccttatgaacgccacgtgcacgtgcttcttcaatcggtaagcgccagtctaagccgactacatcaagcggtaagtcgtgccactcattcactaagtgtgcagctcctacgccgtgcataatcatcggtacacccatcttacgaacttctgcaaaaatacgctccattgctggtttaataaatacgcgataatctgctacatttactgttccaacccaagaatcgaaaatttgaactgcttttgctcctgcgtttatttgcgcttttaaatatgtaataaccatatctgctagtttatccattaaagcaaaccaagcttttggctctgcatacatgaacgctttcgtattatggtagttacgagatggaccgccttcaatcatatagctcgctaatgtaaatggagctcctgaaaaaccgattaacggtacgtctaacatttctgtcgttaataaacgaattgtatctagtatgtacggtacgtcatcttctggattgatttcccctagtttttctacgtcttgtaaagaacggattggattatcaataactgggccaatacctgatttaatttctacatccacaccaattgcaggtagtggtgacataatatctttataaagaattgctgcgtctacgttatattgatcaaccggcaattttgtaacgtaagcacataactctggattatgtgtaatttcaaataaagaatacttttctttaatctttctatattccggctgtgaacgacctgcttgacgcatataccatgctggtacataatcggtacgttcccccctacatgcttttaaaaatgtctcatttatagttcttaccaagacccttgctcccttccttaccaatgcttcgaatacgttcgatatttatctttttttactatacagcttgtaaaaacaaaatgcataatattatgtacgttgttcattaaattgacacaaacattcttaaaaacgcttactattttcacaacattcttattataacacagagaaaaactatggtttagctacttttgacttttctccttcacgattcgtttgtgtattatatggtacaacgtaaaagctcggttttgaaaatatgttaacgaacttttcctcatattccccagcaccatttacagtgctaacatgtgtatgaattccgttctccactctatagattcggtacataattctgttatctggaagtggtttccaacttaattttgctttaaataaaccgaaagggctaaatgatagtttcatttttacatcttcaattttgcgcagtcgaatcggagcgccgattgtttccacaccttcaggcttcataaacttctctttatgttctacattagccttcgttaaaattttcttaaacaattttgtcgcagatgcactttctccttgcaactgatgctccttatccgtacggtcataaccaatccaaacagcgcctactaagttaggtgtatagccgacgaaccacatatctcttgctcccttatcgtcatttggcaatgaagttgtacctgtttttccagctagcgcaccgttatatacaccaactctcgctgtcccttccttcacaactccttctagcattttcgtcatataccatgctgtctgcttcgagaagattttcgtctctacttttggagattccccaatgactgcaccgtgtctatttaatactttatcaataacgtgcggctcaattatatttccatttgctaaaaatgaacgatacatttttacaagatcaaatgttgaaacgccattttttagtcccccaagagctgtacttaaaccagcatctgcaatatggacatttcctttttctaaatattgctttccttcttctacccctaactcatttaatagagaaactgccggtacgtttgccgactctaaaatcgcatcatacatcgtcatttcttttgaatactcatgattataatttcgaggttcatacccttcaaaagaatttctttcatttgttaataaagaatacggattatactttttcgtttctagtgctggtgcataaacgataagtggttttaaaacagatccgggctgccttttggcaaaaacacgattaaatcctctcgggacgtactttcttcccccaatcgccgctttaatccctcccgtacgattatccattaataagaaagcaccttgcgccccttcttctttcccaggaaaattccttgcatcttgaaactggttatatgctaccttttgaatcttttcatccataggtacgacaaacgtatatcctccgcgaagtacttcttgatgagacaacccgtataaacgagcggcttcatctatgaccatatcaatatacggcatatatgcaagctcattctcatctaaatttttatatagagcaattgtcttcccttgataacgaacgctttcttctgcagtcaaatagccttgtttatgcataagtgacaatactagatcgcggcgttccttactcttctctgcagaatagtacggtgaatatccgtttggtgacttcggaaggcctgcaagcattgccccttcctctactgttaaatcctcaacatttttattaaaatacaactttgctgccgcttgaataccgtaagccccatgaccaaaataaatatgattcatatacatttcaagaatttgttgcttcgtatatttttgctctaattgaagagaaattgcgacttccttcaatttgcgcgtaaatgttttttcacgagttaaaaagacgtttttagcgagttgctgcgtaatggtactaccgccctctaccttctctctagctaacgtatctttataaagagcacggaatatcgacggataatcaatcccttgatgctcataaaaacgagaatcttccaccgcaacaaacgcctgctgcacatacttcggaatttgctcgatcggtacaaggtctctattttctacgtataatttcgtaatttctttccctttctggtcaacgatacgtgatgaagagtggaaaacgagctgcttttcatccatcatatagccaccagctaacacgataagtttatagagtacaatcgctactacgaacgttgcgacgccgcctaataaagtccactttactttcttcatacatcgtccttctttccaaatgatggtacatttattatttgaaaaagaagtatctttatgtatataatcttcgaagttttttaagagagttgatataatagaaacaaactagtaagggggcattaaaatgaaggctattatttcatacgaaacacctctagaacaagcacatttcactgcaaaaaatgatgaggaaaatatgttttataaagaaaatacagaagaatctgtagaaggttcacttcagtatgacgtactagatgctgtcggtgaattcaaaggacaacctggctatatcgtttgtaacaacatttctgtaacagacgaaggtcgccctgtatttgaaaaccgctttaaaaaccgcgcaggccttatcgaaaacgaaccaggattccaagcgatccgtgttctacgcccattaagtaacgatacatatgtcatcttaacgatgtgggaaacagagcaaaactttaaagactggacagaatcacgttcattcgaaaacgctcataaaaaacgtcccacgcaagtagaaggaaaacctcaggctcaagcgcatccacatgcagaacagcaaaagagtattttctctcgcccttcttttgtgactacttttgatgtgttagtttaatttttttgagtttggagttcggaaaccacggtatgtgaaattatatcggcgatttttcgaatatatcggcgcaactcgaattatatcagcgtttttctgaatatatcagcgcaactcgaattatatcagcgtttcttcgaatatatcgacttatcgacaaatcatgacacaaaaaggaaacaccattacacaccggtgtttcctttttctttgtaccaattatatatacgaagtgaatctttttttctcatatgctttacttcataaccccgcccagctaccgctacaagagttgtacataattcatcctttctttgaaaatacgattgattataacctactgcttgaacatgtcttcttcgcattattcctgtatatttcgaaaaattacgatatacaaccgttagttgattttctcttaattcataaccaccacttttatatctagcatacgcaagtaacgaaaacacgataaataacggtaaaataaaaaataaagcaatatattgtttcaaatatatactcacgctagcaattagaactgtgagtatgatacttattaaccagctcataatgaaataacgacgcaacgctgtttttggtaagtgagcgatctccgcctcaatttcataaggtaactctaaatatgtgagcaggtgctgtacatcttttttcttcataaaaggatgcaacatcacttcattacttgctgctccaatactgtgaattgcttccacttcaacagcgcaataaccaaatggctggcgaagcatacattcttttacagtaatcgcttgaattcggtgcaattttaagacaaattctttcttttcaaataacccttgaacgatacgaatttcttccccttttcgctcaattttaaagtttgcatatttcaacacatatccagccgtggaaataatccatgaaattgccattaaaattaatgctattacaattagtttataaacaccgtttcccatcacatacgcttctactttacttgtgaatccttcaggaagaacaaaatcaaactttgtgtaaagaagtaccagtccagaaaacactagtccgaaccgaccagatgtaatcgctgctgctaaaacctctttcgctgttaactgataaaccgtcttgctttcttcctcttctatttcttcttttacagtagtttctttcttatgtaataaagagattaaatgttttgcctcgtcttctttaataccagccaacatcacttctggttcactaccaccacccgctacttctatatttaacttcataagcccaagcatctgataaatgacgttagaagacgtactaacattttgcacacgttctttatttaaataactttccttctttacaaaaacaccgtgctttatatgtaaaatattattctcaatccagtacactttaaaataccatttaattgctgaaaaaatagccatgatgaataaaacaaccagaaggaaaagataaaataaataccaaggttccacttgttcatcaggtttaaataaaacaagaataataagtggcaacaaactcgcaactctaatacctaacaatatcgtaatcggatgttgcctcttatacatccttatcactcactttcgcaagttctccaatttgtctttttagctgttctgcttcttctttcgttaaacctggaatactatgagaagttgcggctgttgaaatgtgtaattctgctaaattatactttctcatgatcggcccttgctcaatcgttacgtgctgcacacggatcatcggaataagtacgcgttttacaacgaacattcccttttgaatctcaatctcttcttcatttaatctgtaactataatagcgctgacgtaaatttggaaacacaaaataatcaagtggaataaatgtaatagctcctgttactaatagtccaaacaaccagccccaccagttaaagttaatcataaaaaagaaatacgcaattacgactgttagtataactgccgtcccaattaaagcgtgaattcgccacactttcagcatattagaatgaatctccctttctaacggctgcatctcatcactccaattctatgaatttattacttatatattatcaaaaaataagatttcatatacatttttgtaaatttatagtcaaataaaaatatatgaatcaaaagcagattaaagaaaaacatacctcagttttgaaaattatatattataaatatgaattatattgaactaaaataaaccttacatgattcatgtaaggtttatcgttttatacacaatatatttcattattgttgagatatactagcatcgctttcaattcgcttttctttttggctcagttttttatctttagatttttttaatgttaaagtcataccaataaaaataaaaagaattcctgttatttgcattaaagttggacggaatccagtaagtacagtatctaataatattgccactgccggatccaaaaaaactaatattgagattgtttttgtagataaatagcgtaaactatcaaaaaacagataatatactatccctgtgtgaataaaaccagtagctataatatatgtccaattactttgagtgaggccactaaaagcatctaaatctataaatggtattaaaagaaatatccccaagaatgtttgtaaaaatgtcattgcatacgcactcattttgttaatccctttaccaaataaagttgtaaatgcataaaagagagctgcaagaaatccccatatcatacctgaagacattaatgaaccgacagagaaacttccatcgataccagcaattaataaagctcctgcaaaacacacaactattgaaatgatagatattaatgttaatttttctttaaagacgatacttccaattaacagtacaattactggtgcaagatgataaaccgagatagcaattgtaactgacatattttcaaaggctttaaataagaaaacccaattaaatactaagaaaaagccacatattaaaacttgaataacttcttttcgttcccatttatcttgtttatattgccctgtaagcaaccagcatacacttaaaaatattgtcgcaaaaatacaccttacaaacactaattcaaacgaaggtaagtttgtttgaactgaaaaaaatccaactgatccaaagataaccattgatgctatcatctttaaagccggtaccgttttctcttgcttaaaacttttttgaagcaaattaatccccctccaataaaaactcggtttatagtgagaaaaacaccagcctaaaaaaggacaggtgcttttcctcaaaaacactcaattataaatttttcccagcagtccaaccaccatcaattacaaaattagaaccagtaataaagcgggcctgatcagaaatcaagtactcaatacatgaaacaatatcctgcggcaacccccaagtatctaaagattgattactttttatcatagacatcaaggctgtattactaaagtattcttctgtaagttcagttctaataacaccgggagaaatgctattcacccttatattttgctttccaaattccatagccatctgtttagtcaatccgattaaagcatgctttgatgcaacataagcagctcgctctggttcagccattaatccagaaaccgatgctatattcacaatacaaccttttattttcgattcacaccatcgcttagctacttccctagaaaggataaatggggctactaaatttacatcaattacttttttaaacatatcatcggataaatgtaaaacaggtgttatctctcgaataccagctgcatttattaatatatcaggagaaagcttttctaaatctaattgagtaaacagattatgaatcgcttcgctattacttaaatcaatttgcactactttcaaaggcatatctgttttcatataatctattaagttattattattaatatcaagcgctattacatgaaatgatttttctaaaaagtattttatacaagcatgacctataccgctattggctccagaaatcataattattttattctctctcattttgtctccttataagaaaatgttactaataaaatatcacgaaaagcctccgtactacattctgttccaagtggcgttacggcatggaagaccttttgtccaaatactaaagtttctaaaggctccttcaaacttataaactgattaatttcccgaggagaattagctattaaattatctccaccaatagctgtattacttaaattcataaggtgtaaaaacactactggttcatcatctttatgtaaccaaataggtgaactaaaagatggtctttctttagtagctttatatcttacttgatgtaaacctataattaagtctttacttgtatctattatatttgttttaaatgcaaattcagtatcgaagcgcacgatattttgaattaaaggattacataaaaagctatcatttatgctattgaactgtctaactttcccgccatcgtcatagttatattctttagattggaagtaatcattactattatctaaaatataatctggtgaatcaacatactttatataccttgaataagatctagcacgacattcaccgtatgcatcatcttccaaattataataatctaactgtgcttgtgttaatagacgatgattctcttcctcttgtaaaaagatttcatttgaaatttcaaggaatcctttagattcaaattcatgtaccttttcttctatgctaaagccactcattttactaagaacaaacgtcattataaaaacctccacactattgtatttttctatctcaccctatgttagaaatgcaataagtaaccgagattcttgcttaataaaattaaaaattatgatattcaattaatacaccaaatgaaatatacgtaattcattaaaattatttattaagcaatattatatatcctttcgggtattttttctaattatctgaagatttatcaacattagtcttaatattcaaaaataaagaaatagatttttcagaaagataaaactgcgcgtattgcaattatttatgtatataactttttttaaaattatattttaaatatagctagttttttataaattttttgatataattacatacgggaaaagggaagaactttgtcttcccttgtgtttttatttgcatctagtacttttgctagatgctttttttatgctaaaaaaggtatcctcaaatactttgaggataccttttcacctttattatctctgctgttttctacctaatatgagtaatccaaaactcatcattacaagaagtgctcccatatatggttccacaggcattttctgccctgtcttcggtaattctttttcaggtttctctggattcggtgtcccaggcttttctggatctggtgtcccaggtttttctggattcggtgttccaggcttttctggattcggtgttccaggtttctccggattcggtgttccaggtttctccggattcggtgttccaggtttctccggattcggtgttccaggtttctccggattcggtgttccaggtttctccggattcggtgttccaggtttctccggattcggtgttccaggtttttctggatctggtgttccaggtttttctggatctggtgttccaggtttttctggatctggtgtttctgggcctggtggcgctaaatgattcaatttgtttaatacttctaattgaactgcatttatcattccatttgtaatttcaaatggaattggattagttaatttttcatatccttttggtgcttctacttctactagtgtgtagttacctacagatagatctgtgatttttgcctttccatctttatctgttgttactttcactactacttttcccttttcatcatgaacctcaaacacagctcctgataagacttccttgctttcagcggccatttttataatctccactgaacctttgtctaactgttcattctctactttcaatgataagacttttgtcataccttttgtaatttcgaatgatactggttccgttaactttttgtaacctggtaagctcttcgtctctactaatttgtattttcctactgatagatctgaaacgtttgcttttccttctttatccgtcgttactttcgcaactacttttccttttgagtcacgtacttcaaatacaacattttctaatggtgctttactgtctttatctatttttgtgatttctacattccccgtatctaccatttcattttctacagtgaacgctaaagattttgtcataccttttgtaatttcaaatggtacaggcttttctaattttttgtagcctggtaaactctctacttctactagcttgtactttcctactgataaatctgaaactgttgcttttccagctttatctgtcgttactttcgttactaccttgcctttgtcgtcttgtacttcaaagactacacctgctaacggtgccttattatctttatctatttttgtaatttctacatttcccgtatctaccatttcattttctatgtttaatgatagaacttctgtcataccttttgtaatttcaaacgatactggttctgttaattgtttgtaacctggtaaactttctttctctactaatttgtactttcctacagataagtctgagatttttactttaccatttttatctgtttttacttctgttactactttgcctttgtcgtcttgtacttcgaagactacgccttctaatactttttgactatctttatctacttttgtgatttctactgaacctttgtctaactgttcattctctacttttaatgataagacttctgtcataccctttttaatttcgaatgatactggctctgttagttttttgtagcctggtaagctctctttctctactaatttgtactttcctacagataagtctgagatttttgctttaccatttttatctgtttttacttccgttactacttttccttgttcgtcttgcacttcgaagactacgtcttctaatactttttgactatctttatccacttttgtgatttctactgagcctttgtctactagttcattctctacttttagtgataagacttctgtcataccttttttgatttcaaatgatactggtttcgctagttttttatatcctggtaagctctctacctctactagcttatattttcctactgataaatcagcaatctttgcttttccttctttatctgtcgttacttttgttactactttgcctttttcatcttgtacttcgaagactacgccttctaatactttttgactatctttatctacttttgtgatttctactgaacctttgtctaactgttcattctctacttttaatgataagacttctgtcataccctttttaatttcgaatgatactggctctgttagttttttgtaacctggtaagctttttttctctactaatttgtactttcctacagataagtctgagatttttgctttcccttctttatctgtcgttacttctgttactactttgccttgttcgtcttgtacttcgaagactacacttgctaatgctttttgactatctttatctacttttgttacttccacatttcccttgtctaacatttcgttttctactgttaaagcaagagattttgtcatgcctttttcaatttggaaagtaatcggatctactaattgtttatatccttttggtgcttttacttctactaacttgtatgtgccgactgataaattagtaacttgtgcttgtccttttttatctgtcgttattttagcgactacttgtcctgcttcatcttgaatttcaaagactgcatcagctaaagcatctttattttctttatctacttttgtaatttctacatttcctgtatccactaattcattttctacagtcaattgtaatgctgttactctacccttttcaatttcgaatgaaattggcttttctagtggtttgtatcctgccggtgtttctacttctactaactcatactttccaatagataaatctgaaacgtttgcttttccttctttatccgtcgttacttttgcaactacttttccttttaaatcacgtacttcaaatacaacattttctaatggagctttactatctttatctatttttgttatctctacattccctgtatccaccatttcattttctactttcaatgatagaacctcggtcatgccttttttgatttcaaatgatattggtttttctaattttttataaccaggtaaactttctacctctactaattcatactttcctacaagtaaatctgaaacatttgcttttccatctttatctgtcgttacttttgtaacttcattacccttttcatcttggacgatgaatgttactcccgctaacggtgctttattatctttatctatctttgttatctctatatttcccgtatctaccatttcattttctatttttaatgatagaacttcggtcatgccttttttgatttcaaatgatactggatctgttagtttcttatagcctggtaaactttctttctctactaatttgtactttcctactaatagatctgagatttttgctttaccatctttatctgtttttacttcctttactactgttccagcttcatcttgcacttcaaaaactacgccttttaatgcttttttgctgtctttatctatttttgtaatttctactgaacctttatctaactgttcattttctactttcaacgataggactgttgtcataccttttttaatttcgaatgatactgaatctgttagctttttgtagcctggtaaacttttcgtctctactaatttgtacttccctactgataaatcagagatttttgctttaccatctttatctgtttttacttctgttactactttttcttgctcatcttgcacttcgaagactacgccttctaatactttttgactatctttatctatttttgtaatttctactgagcctttgtctaactgctcgttttctacttttattgctaaagcttttgtcatacctttttttatttcaaatggtactggttctgttagctttttataacctggtaagcttttcgtctctactaatttgtactttcctactgatagatctgaaacatttgcttttccatctttatctgttactacttttcttactacttcatctttctcatcttggacttcaaattcgacacccgctaatactgctccgttttctttgtccacttttgtaatttctatattacctttgtctaccattgcattttccacttgtattgggaatatgccgtcccctgttacacttacttcgaactctgtttcttttaattggtagccttcaggcgctttcgtttcttttaaaatatattttcctagtgctaacggtttagagattgccttaccatctttatctgtaacaatatgttcgactactacaccgtcttttactatatcaaactctgcatttgctaatggtttttcaccattttccgaatcaattttctttatttcaatttgacccttttgcacagtatttttaatttcaattgtttttgtttctccagcttgaagtgtaacctctactgggcttgttaatttttgatatccttctggtgctactgtttcataaactttatacgtcccaggagctaaagtttgaggtactgaaaaacctttttcgtccgttgtcagttttgcaacaacttcatttgcactatttcgaacttcaaattcggcacctttcaaccctttgttcggattctcagaatctattttatgaagcgatactgtaccatcttttggagcttcaggcggtgtaatagttacttcttttgatgttaatgttttatcatcaaaatgtaattccgctttattaggaatcttcttatctacgtaagaagataagtctgcattatttttaattttcgccttgatactaagattaattatctggtcttcatatgacttataatcaaaattctcaccaaacgtaaatgttacttcacttctttgtttatctatatttaacgtccctttagaagtaatatcttggccatttttatcatacacttttgcctctaatacttctaaaacatcttctaaatcatcactaattaccatagatgtgtatttaggaggatcgttcggtatatgtgtaccaacttggtattgaataacttgatccatttgtgttagctgctcattctctacaagcttgtcattctcatcaactatatttttttcaatgctaggtggattattgtcacctgaaccggatcctcccccaccactcacaaatacttgtcctactttttcttcagttttaatatttttaccttctaatttcacagtatttttatgaggttttgcagcaggatttgtaacctttgttttatatcttaaaatatagccttttgaactgtctggaaattcaattgtaaatccagtctttgttgcatttattttaatgttagataaatttgctggcttaatatttgttggtgcataaccatcttcaaatacagcctcttctaatactacgctgtctgtaattaactcatgcccaggtcctaatgtatctgttaatttaagatcttgcatttctgttccagttgcatttacatatacaagccaatcagcaatagacggatcttcttgattataagaaccccatttcaatagattttccgtattgggttgtggcttcggtctctctgtcgtattacttacatttacttctttatttacgatttgaccatcaacgttaaattctaatggaatttctttaacaccatcatatgcttctagaccaaagtagaattctacgaataaagaacctttaatgttgttctttccttctacgtaatcacccatagtacacgttaatagaccctttttcatctcacatgtaccaactgtttttccttcagcatcttttaaaggaaaactcatattcataaggtcttttcgaaactcttttggcatatcaattgtgaattgatctccactttttattttttctttagctgaccacttcacttctactttcataccatctgaggcttgatatggttcagatgtcgtgccatcagtacgggaaatattaatttcgtccactggacttttcatcacagcagcttgaataactggagcccacacattcagcactgaaaataatactagaaaaactaatgaaaccattgaaatatgtcttttagtacttttcatttgcatagttccctcctaaatttttatatttatataacaaaaaaagatcgtccggttgcatcaaaaatgtgcaaccagacgatcttagtaaccaatatgtattaccgtagactctaagctttgcggcctatcctttcgaatagtgtgctaaaaatatcttttattctttttttgtttcattttcctcttaaaccaaatattactataccgtctggacggttataattcaatactctataaaattgttctatttttctaataaaaaaaataattcaccactacattaaagaagcaatggtgaattattttctcattatatagttcgcatattctatttatatgaattactaataagagcttgaatcactttttctcttaactcggggcttagccttccaacccctaaatattccgaataccataatccatctgctgctaatctaataattgttgcacaaactgaatctatctcatcattttctatatttttttgcagttgctgaaatgattgttgtaatggctcaagtaattcaggttttaacatgagtgctgccatcatactgctagacaactcttctgttcttctctcattacttaatctttcctctacaaaagagcgaacccatctccctttcctctctgagtcttccgctactttattgtaaatggccccttcataatcctctacccctcggactatcataccttctattaaagcttctttatttgaaaagtgatacaataatccacctttgcttaaacccgcctcttttgccactgcttctaaagttaatttagcaacccctttacattgtacaatttgagaagcggccgccaaaatcttttgccgcgttatgcttatactcattcctttttaaaaccccatttctactaaatttatataaatacgaatcttatttttaatattgttgattactactaagtattttctttatacaacaaaagcttcattacctttgaatttttagttacttattctattaaaaatttccatatcattcaatatgataacattaaatacacaaagctgactatacatctatacttttgtatttattgaaaatatatccattaataaaatttaccgatttagtccttcttattactttaagacagcagtaattctttcagtactaaataaaaaatgttattactcccattaaattgagtaataacattctacttaacaaattcgctgccaactagcatccttcacatcttcactagtcggttttctaactgatccaataaagtgaaactttatatccgcaacatggacaggtgtatttcattttgtcactccattattaacttgttttcccatatattccgactcacaaagaatgtaacagcacaaatcatagttatccccatgaaaaatgtattagaatcttcatatgtagttggaatgcctaccgttacgaaaacaatactaaaagctaaaaatagatataataataaagatataatatagcttagtttaaatcgtaaaatgatacctctaaacaatagctcaccaagtagacagccacctaaaataataggtactccgaaatacaatgtaaggactcccatttgcgcagtagattgaattatctttccaattatgttcggcgaaaccagctcactatcgtttcccatcctatcatataaatcaagtgctgttgctgaaataaagaaacttaatatagaaaatgaatacggtattaaaaatttgctcactctcattcacctcgcttttttctttacatatattattcattatttcctatcatttttacataaaaaaataaccctctatgataaaacatagagggtagcatttctatataaaaatctataccttatcctgaagtgaatcccgaaaataggacaaatatcaaaacacctaaaccatctgctatctgctccctacattctttagggtagatagtttatatgttttattagaaagtagtgccttcttttttataatattcttttgaaatctcttcataaaatgcggctgatgtcgcgtagaaataaggtgctaaccataagaaaccgattcctacagtaagaatacttaaaatgaaccaacctaagaaacttaagcatagtaaaaagtaatccattttatgtccattcatcatatgacgactctcagtaatcgcttgattcgctgtatattctggatgatcattcaaaataaaatatgtcatagaataagaaaatgatttaataatacctggaataataagaagtaatgtccatagagtcaagtatacatacattagtaaatatgttaaaaacgacttcatcaacttacttccatcgctaaaccatctaaatatatgaccaatgcgagcatcagtcccacgaattgcatttaaaacaagataataggcacctattgttaatggaccaataacaagcattactataatacttactgtaagtgaatcacttgcttcttcccaaccccaaaatatcgagaaaatacctgttgttagcatttcaacagctccaataaggattccaattaataaggttgcccctaccgctagtccccatcttccttttaatgcatcaagtgcttctcttttcaactgacttatcatatataacctcctaatactatttccattttattataccatttatatcaaaaatcccacatattttcctaaaacagaagcatattaccttttttcatacgtattgatacatgtgtgctgtagttgtactaatatatggattaaacgactcttttccctataacaaaaaagcctgcctttcataataggcaagctttctcaagttacatctcatttattttcttcttataccaatcctgcattctctccgcatcttctactctcgtatgctctattttataactagatgatgcactcgaaaacttatacgtacataaatccgcacggcgctggaaatatgattgtgtcttctccattgattggacgtgtcttcttctaataagtcctgtatattttccgacgctacgatagacaagtgtaatttgttctccgttaacactgtagccatttgttttaaatgttgcgtatccaagtgtaaagataaggattgcgagcggtagtaatgcccacatgatgtaatacttttcaaagtatatgcttattccagtaagcgggattgcgagcatagcgaaaaagataaaactatcaatgagatagcggcgcaatgctgcttttggtaacgaagtaatacttgcattcagttcgtatggtaattgtaaatgcgcgagtaattgttgcactcgatcttttcgaatgataggatgcagtgtaactttttcttctttcccttcactttgaatgacttctacttgcacagcacaataaccgaacggttggcgtaaaatgccttcttttatcgtaatcccttgaatgcggtgcaattttagtacgagttcttttctctccagtaacccttgcgaaatacggacttcatcattttttcgattcactgtgaagttaccgtgttttaacgcgtagccaattgtagatatcatccaagaaacgacaagtaaaatagctaccatgtaaatccagccatatatatcgtggtccattacatatgacgtcacactattttttatccatttcggaatatactcatctacttggtgataaacgaaaaagattaaagagaacaatactccaaattgaccagatgtaacagacgctattaaaatctctttccacgttaacttgtactctgtcgtttgtttttcctctgtaacaattgctttttctactgtattttctgctgcttcgtctaacgttttttctgctttcacttctggagttggctcatttagcaaagtaataagctccgtcgcctcttctaccgtaattccagctaagctaacttctgcttcatcgcccccgccagctgtttcaatctgaatttttttcaaaccgagcatttggtatagtacgttagaacttgtattaattgtttgaacacgttctttatttaagtagctctcctttttcacaaagagaccttgtttcacatgtaatacgttattttcgacccagtatactttgtaataccagcctacgatagctgaaataattgtgatcaacgcaaaaccaataggaactaaataccaaaatggaaactttccccttaagctaaaaagaaaaataatgagtggtataaaatctgttatttttaattctaataacatcgtgattggatgctgcctcttatacatcctcatcactcactttcgctaattctgcgattttcgttttcaacatttcagcttcatacatcgttaaacctgggatgctatgagaagttgctgctgttgaaatgtgtaattctgctaatccgtattttctcataattggcccttgttcaatcgtaacgtgctgcacacgaatcatcggtactaatacgcgctttacgacgaaaagaccatgctgaatttcaagttcttcttcatttagttggtagctgtaataacgttgacgtagtttcggaaacgtaaagtaatcaaacggtgtatatacaattgttaatccgatgagcacatagaaaatccaagcccaccaattaaacttaatcataaagaaaagatatgccaaaatgactataatactgattcctagctcaattaaagaacgcgctttccacaccttgaccatgtcagggtgaatttcatttttcaatggatccatgtaaccactccaaatctagtaatctaatatatgaatactctcaatctatattttacgtaactttacagaaaattgaaattcaatcttctttcttctcaggaataaaatatccgaaccaaagtagccaaatgaaaccgattaacttcatccaatttccatccgcttgaaaagcttcaatcatacctggtattttataaaccccaataaatccaagaaaaccgagccaccagtttttttgcattttcatctttactcctccttcattacgtttttcacatttcgaatccaaatttctttatactttaactggaatcccatgagcatatagttgctcatattatcaatcacgagtgctagcgtatgagcattttcttccgtttcatgttgtgacactacgtcaagttctacgcctttcttcaataaatcgtggaaaccatttaagaaatcttcttgtatttcaaataagcgtttctgatacttttcatttcgcgatgcagttacgagaaattcattgataacgcgtaatatcccttcttgcccttcatattcagagagcatatgtaaaccatcagcaattaacttttctgcaaagttttctttcgtatattgctctttatcgaaataactcacgaaatgatatccagagaaaatttcttcaaataaaaaatcgattaacgcttctttagaagaaaaatgataataaatagccggttttgaaatacctacctctttcgcaatcatggaaagactcatcttctcaatgccgtgttctgccataagtttaaatgaagcctctacaatgttttgcgatgtttgtaaattcttcgtcatactgtacctcacttatttttacttaccggtcggtaagtaaattataaaacaaaacgaaatgattttcaatttagttagcactacagaaggtgtttatcagaaaatacagaaagttataaagtaaaagcaacatataacaataaggaggatatcatatggggcttggtggtaatggcggtagtggtggtaatggcggcggtgaagcaggacaaactggtaagagcggattttcattaatcattgtactttttatcgtattgattatagttggagttagctatatcggacttggcttctaagaaaaggcgtcctacgttacacatgtaggacgccttctttttaatccctattcagcaatcgcatacgataacaattcatcgtcacttctccgagtctttgcagtagttgatagttcgcatatgcgcctaccggggcaccgattattggtacgagctgcagcattttggctaaatcgatatagtctcggtactctgtttggaacttttcccagtccatatgattttcttcttctgtatcccacgtttcgattgctttccatatttcttttcggtgatcgtcacttgaaaaggcaagctgaaaaacatgaaggataaaaaggcgctcttctttgttgctcgtatcaaatccgtacaatgtcgctgcatcgaataaaaatttaattttaatgccgagtaaaagcggaaagtcagcaagaccgaggagaataccgccagcccccgtccctgccccttctgccgctgctatttttttatactcatccatttttttacgaacttcatcgtcacgtctttgcagtgaccatgtcgtctcttttagcttcggctttataaagtttgacccggcgctgattgtttgcaccatcatacgaatcgtctctgttaataccttttgtactttcgccggaatgagctgttgcaccttcgtctgcactttctttgagaaccgtgtcatcatagaagaatctttcataaatgtagctttccactgctccagttcttttataaccttttcttcatatgtaatcataggttcattcccttcaatttaaacgctcaatgcgcttcgccccgtattggtaaacgaaaccgatactaaataatatgcttacgataagtaaaattcctgtcatcatgaaatctttcgttgctagtgcaaatataactgtaaagattacgctcccgatgattagaatcgcgtttaataaagtaagaaaatctttcttcttctcttctccccctaccggatacaaatcaagccaaatcttcatgcggtgatgtttccataaagttaagagctgataaccgattaagtataggaaaataaggcttacgataaatcgtccatataaaaacggaatgaagtacaaaataactcctccaagagcgagcaaacgcacatataatccaaaatagttacctgatcttaaaaacgttctcgtatataagtataaatatgtacgcttttcaccaatcatcgaaagaatgaaatcgagccattttctgcgtgctactctttcttttaatgctggtacatcaacgaacatgttcgcgatgcggtacagcagcatcatcttcttaccttcttcagaaattaaatactcccagtttagcggctttcccttcaccatttgatgcagtactacgaggtataacaccatgagaaggacgattccaccaataaacataacggaagtacgctctaaaaggaaataaacaaataagccgtttaaaataaaacgaatgaaccaatcagctctttgtatattttgatctgttaaaaatgacttttcccatgctacgaataagttccacgcttttacgatgacaaacgcgagtacaatccatatgtaagccgctcctgtttgtttcatttgctggaagtataacggagcaagcgctgccgctacaattgcgattatgtacaactgaatcataaacgtaaaaagaaacgcctttgtaaagtatggttttaatttttgttcaactggcagcaagtaaacgagatccgcttcttttaataacgtttgaatggatccagccgttaacacgagtccaattaatactgccattacgagcgccgccggaaacgaaggtgttaacgtttgtaaccattgctggtaataatacgctcccgcaccaatgatgaacacgaaaataaatttcaaatgatcattaaatacgtatttactatatgtacgaacttcttttagaaagtgacgaaatcgttctttccataacgctgtgctattcataatcttcttcctttgttagcgcgatgtaaatatcatctaacgttgcacctggcatattaaactgtgattgcagttcagatagcgttcccttcgctcttacttcaccttgatgcaaaataatgaacgaatcacaataacgctctgccgtcgctaaaatatgtgtgctcattaaaataccggcaccactctttttcatttggtccatcatttgaagaagggattgaatcgctaacggatctaatccaacgaaaggttcatctactatgtaaagagatggctccactaaaaatgcgctcataatcattactttttgtttcattccttttgagaaatgagatggaaaccattttaaacgatttttcatacgaaactcttgtagtagttgtcctacacgttcttcatattgtttttcatcaatgccatacgccatagctgttaatttcaaatgctcttctaacgttaattcatcatataatactggcgtttccggaatgaatgaaaagctagaacggtacgctgtcatatcatcacgaattgttttcccattaattgtgacagttccttttttcggttccattaaaccgataatatgtttaatcgtcgtacttttaccagctccatttaaaccgattaagccgacaagttcgcctttattaacagagaacgaaacgtcttttaatacaggtcgtttcgtatatcctcctgtaacattttctacacgcaataactcgctcatacgacaccactttcttcattagtattcattctatattcatcttaccaaaaattatgctgtactacatagtatccatgtactcaaaaaaattttttaaatttattagcatatatttttccgaaagcggacatcataattattgaagaaggaacacattgaaaaagcaaccaccaattgatgagtacaacaacatagtgaagtcatcatgaaatggggtgtccaagttggacaatgaaatttacacataaccagatcatttgtttcattttcgaaacggggtgtctctgaaagagcatatactgttttaaaaaataaacaatttcattttaaaaaagattgcaattcatttcacttgaaaatggggtgtctacggcagaaactttagccgatttaccgtgcatttcttaaataaatgaggtgtctgcgaaacgtaaattacgataatgctttttcaatccctcttcagaaaacaggaagctgagtcagcttcctgtttttcgtgtttgttctcttatataattatggtaaaatacggctaaggatatttgaaaggatgagatcaatgaatcatacagcagacaattgtattttttgtaaaatcattgacgggcaaatcccttgctcaaaagtatacgaagatgaacatgtgcttgcatttttagatattagtcaagtaacaaaaggacatactcttgttattccaaaagttcacaaacaagacatttttgcgttaacgccagaaatcgcatcacacattttttctgtcgttccaaaaatcgcaaatgcgattaaagcagagtttaatccaattggctttaacctacttaacaataacggtgaaaaagctggacaaactgtgttccacttccaccttcatttaattccacgctacggtgaaaaagatggtttcggtgctgtttggaaatcacaccaaaatgaatacactatggaaaatttacaaaacatcgcaagtacaattgcaaatagtgtgaaataatgacactataagaaggcgtaatacataacaagccagttccctgaagtcatcaaattccgcatggcttgtttctttacttaaaatgctcagggatgattgtttgtgcatagcacatataagaaagatatgcatatttttcccatcatgaatacgaacaaaaaataaggaggtctccttttatgtcaaaagctaaatcctttattacaggtgttatttgcggcggagcagttgctggactagctgttcttttctcaactccttcttctggtaaagacatgcgcggcaagttaaaagaaaaaggaaatgatattaaaaagactttagctgatattacagctgatacgaaattattaaagcgtcaaattattgaaactgcttcagaaggtaaagaagtgtttcaagaattaaaagatgacatgcaagacacgctttctaactggaagcaagatatttctcaaaacaagcgccatattgagaaagaaattttggacatccaaaagtcaattgagaaactacaagaagctgttccagaaaaagcgtaaacaaattcctgcttagttttttgcatataacaaatattttttatataaattgaccttgacacggcatatcatatagatatgccgtgtttttatgcatttacaatatatgttatcacttaacatgtaaggacaacgtatgtattcacgactcataaaacgcttccatagttatgcatgatttgtatagaatgtcatttttccgaaaaattttcacaattctcacaaaaagactttattaatttttattttactggcataatagatagtaatgaaaaaagaatgttaaagtgggtgagtaaatgaaaagtggagaaaaagattactcggtaaaagaagcgatgattttcagccaacgcattgctcaattatcgaaagcgttatggaaatgtgtagagaaagattggcagcagtggattaaaccttacgatttaaatattaatgaacatcatattttaacaatcgcttatcatttaaaaggggcttctatttctgagattgctaagtttggagttatgcacgtatcaacagcgtttaacttctcgaaaaagctggaagaacgcggctatcttgtattctcgaaaaaggaagatgataaacgaaatacgtacattgaaattacagacaaaggggaagaattactacttcgcttaatggaagagtatgatcctgaaaataattcagtgtttaatggggctcttgcacttcgtaatttttatgggaagttcccagaaaatatcgaactgattgcaatcctgcgtaacatttacggacaagactttatcgatatttttgagaaatcattagaagatattgaagagaactttacagaatccgatcaaaagttagttaagaaataatctatttattttttcgcaatcatgcttaagaattcattcataagcggcttaaataaaccttgttttgctagcgcttccgcagtttcgtgtacttcgagctgatgtggaagcgctttttcaaattgatctaacagcgcatcgaacaaaagaagcccttctgctttctccactacatattgatcgttcagtttttcacaaagatttagtatacgttcaatatcttttttacgagcttttttctttatgatcaaagaataaaatggacacttctcttcatcaatcattttaaataataagtctacatagtattcagcttgttctaatcttctaacaacgtccattttctccctcactttctaacacaaagtcttctatttctgaattttgtaacacgaacaaaatatcgtgtgatacaatatatgtatatgtattttagccaaaaggaggtctcgcctcatgacacttataacagttgtttttgtcgcattcgcacttcttgttatattttacacgaatttcatgacacatacactgtgtgaacgaaaacaaatagctgcgagccgccagcccggtgtctttcgggttattaatgtatgtataacaattttattaatttctagttatatagaaattatatttcatggaaagtgaggaaggaaagccccttcctcacttttttcctctataagcaaattatacctacaataaccaataaaataaacagtacaagtaataaaataagttgagaattcatccccatcccctcctctattctgtatatgcggcatacgcccaatatggcacactttcaaaatctgacacgtactggttaatttttctttatcaatatgaaaatgcgtcgaaatatgatatattaaattttgtacatattgcttatactatagaacaaaacattcatcaaaactttatcctcagccacggtaagccctgttaagcgcgctttaccaatataaaaaagcaaaagtatcagtgagacttaatcgggctcttatgaatgaaaattcatcggtgtaggataaattaaaaatacataatagtaggagtgtttatcgaatgaagaaagctatgcttgccttagccgcaacaagtgtaatcgcattatcagcatgtggaacatcatcatcagacaaaattgttacatctaaagctggtgacattacaaaagaagaattctacgaacaaatgaaaaattcacaaactggtaaacaaacactaaataacatggttatggaaaaagtacttattaaaaactacaaagttgaagacaaagatgtagacaaaaagttcgatgaaatgaaaaaacaatacggtgatcaattcgatacactaatgaaacaacaaggtattaaagaagaaactattaaaaatagtgtgcgcgctcaattagctcaagaaaaagcggttgaacaatcgattactgataaagatttaaaagcaaaattcgaggattataaaaaagaaattaaagcaagtcatatccttgtaaaagatgaagaaactgctaaaaaggtgaaagatgaacttgctcaaggtaaatctttcgaagaattagcaaaacaatactctgaagatacaggctcaaaagaaaaaggtggcgacttaggattcttcggaccaggaaaaatggtaaaagaatttgaagaagcagctcaaaagttgaaaaaaggtgaagtaagcgaacctgtaaaaacacaatttggttaccatattattaaagtaactgataatcacgcagatgcaactttcgataaagcaaaagctgatattaaaaaagcactagttcaagaaaaaacacaagatgctcaatttatgaacgatcttatgatgaaagaaatcaaaaaagctgacgtaaaagttgacgataaagatttaaaagatcttttcaaagagcaaaaagctgacgataaaaaagacgaaaagaaataatgaagtaaaaagcttgggcttaggcccgagctttttttatctcctcttctctcagtagttaatctagattcggtaaatgaaattatatcggcgatttttcaaatatatcgaccgcaactccaattatatcggcgattttcaaaatatatcagcgcaactccaattatatcagcgattttcgaaatatatcgacttaccgacaaaaaacgacaacaagcgtgactccctcttcaaacacaaaaaaaccttgatccacgccacgtagaaccaaggtttatcttattatcattgattaaatgaaaaaactatgttaaattagaacagaaacacgttttacaaaacaaaaggaacgtatttatccgtatcttaattgtacaccaaaacacatcttcagtcaacctctatttttcacttttaaaggagtgcttaccgtatgaacaaaaaacttgatctagagcaaaaaagattggataccgtaattgaaacaattacggagcaaattgataaactggaaaacgaaactggcagacgccgagcagaagtaatcaatattcgtaaacacttttgggatgatgtgaaagtgaatactgatactttcgatgattatcttgaaacagttatcaacttaagacaacaagctcagtcactagctgtcacacaaattacccataagcacacctttaatcgacttgccgcattaagacgcatgcataaagcaccttatttcggacgaattgatttcaaagaagaaggagaatctgccgcggatcaaatttatatcggcgtcgctacacttactgatgcaagcggagaaaacttccttatatatgactggcgcgcacctatttcgagtgtgtactacgattatccaccaggaccggctgaatacagtacaccaggcggcgtaatccacggtaatgtggagaaaaaattacaatacattattcaaaatggcgagattgattctatgttcgatacgagccttacaattggtgatgaaatcttgcagcaagcgctcggaaaagggacgaataaacatatgcagagcatcgttgctacaattcagcgcgagcaaaatgaaattattcgtcacgatgaaggccgactccttatcgtgcaaggagctgctggtagtggtaaaacgtcagctgccctgcaacgaatcgcctacttactatataaatatcgcgaatggttaaaagcagatcaaattattctcttctcccctaactctatgttcaacagctatgtttctaacgtactacctgaactcggcgaagaaaatatgcagcaagtgactttccaagaatatttaaaccatagactaagtaagtcatttgacgttgaagatccttatgaacaattagaatatatgttaactgaaacgaataatcctacctataaaacgagaaatgcgagcattcgatttaaggcatctactcaatttttcgagatgattagagcgtacagacaatctcttgaatcttcaggcatgctatttagaggaatgaaatttagagggaaactgattgtttctgcgaaagaaattacagaacaattttacaataccgactcctccctccgcttccatagtcgaattgagaagttaacggattggctaaacaagcaaatagatgcacttgaaaaagcagaactgaaaaagccttgggtagaagaagaaattgaattacttagtaaagatgaataccaaaaagcttataaatatttacagaaaaaaggcgagtttgacgacaactcctttaatgattttgaaaaagaaacgagagtacttggacgtatgattgtccgtaaaaaattgaagccactgcgtaaaggcgttcaaacattacgctttatcaatttcacaggcatatataaacaacttttcacagatgcatcatgggttactgagaaaaaaccgaaagagtgggatgacatttgctccttaacagtaaacatgcttgatgaaggaaaactatattacgaggatgcgactccattcttacttttaaaagaattaattgaaggcttccaaacgaacagatcgattaaacacgtactcgtagacgaagcgcaagattattcgccgtttcagttcgagtttttaaaacgtctcttccctgctgcaagaatgactgtactcggagactttaaccaagcgatatttgctcatgcgagtgaaacggttaatttcgatacacttacaaatttatacggtccagacgaaacaaacggcattaacttaactcgtagctaccgctcaacaaaaccgattattgaatttacacgtgctctcgtaccggaaggcaagaacattcacgcctttgaacgtgacggcgagaaacctacagtgacgaaagtatcgaatgtcaacgaactgcacgaacgtattactgccaaagttgctgaactacaaaaagagcagcacaatacgatcgcaattatatgtaaatctgcagctgaaagcgcagctgcatacgaagcacttaatcatatcgataatattaaactcgtgaagagtaactcagccgagtatgagcaagggattgtcgtaatccctgcttacttagcgaaaggtattgaatttgatgctgttattatttacaatgcttctaaagatgtgtacagcgatgagagcgttcgtagattgttctacactgcttgcacacgcgcaatgcatgaattgcaactttatagcgttggcgaggttagtccttttatacttggagctgattcggagagttttgagcttataatgaaaacaccttgataatcatcaaggtgtttttctcattctaaaaggaatatctttacgtcgatatacactcagcacaatccccattataaatgcatgaaacagagttggtatcaagccgtaactaataaagggtaatgatatagaaacacgtggtaatatcccaagaatcatgccaacgttataaacgaaatggaatacaaaaagagttactccaccaacgaggagtaatttaccataaccatcatttattttataagctatattcattattcttactgcaaaaagagacaaaatcaagacaagaactagcgcaagcacatatccataatagtaagtcaaacttgcaaatacaaaatcagtatgagtagcagggatagactttatatttccatatgtaccaaaccaacctgccgatgccattgcctcttttaaacgtaaataccattgatcatgctctgggtttaaaaaccctaaaattctagctatccggtattcttttacagcagaccaggaaaatagatctctaataataagaagaaaaattggtaacattgtaatgagccatgctgttttctttcctatcttactccaccaaagcataacgaataccatcgtcatatagatgaaaattggcaccataatcgatgtcgttaaaaatagatataaagaaaataaatacaacatgaaaagatgtataaactttaatctactgttattaaaaaaagaagcccaggctagaaaaaagaatggtatcgtcattaaacagtcaattttgatgggaccaattttcattaacgcttccccatttatagaaatagtcggaaaacattttatagctaacaagataagtattccaattgtataaaacagccatccaaacctctctagcttccggtaatcaagcaacatcatcccaatggctgttgcaatcccaagaattacaaaaattactttgttcattagtaaatcatccgtatgcccaaaagcgattattggtaaaaaacctaatcccatagcagctactaataaaataagtaaaaaccaatccacctttggcttatgaagtttattaagttcttgccctagtttaatcggacttcccatttgttccaccgctttattttcagcgacttcctcgctcaaacctttttctatccatgtgttcttcgcctgttttaggtgaaaatctagttccgttgctacaaaatctttcgcttcttttgatttaatataattcgtaacttcgcttacaaaacgctccccttttttattcaatttctcctcactcctgtactaagccttttaatataaattgtaccttcgtagcatttttttctgcctttcgcagcatctttctccctttatcgtttaattgataatatttcgctcctgcatgatcccagctagattggatcaaacggttctgttccagacgatgtaatacggtatataaaaacccttcatttccttcgaatttccgaatccctctccctcgtagtagctgtgacaattcgtaccctgttttttcattactgaggagttgtaaaatcgctaaagagatgtcctcttccttctcgtttgaagcattgattttttcgcgcacctgctttcgatgttgatcagaaaaactcaaatgtttaaacgttgtattctccattgattttcgcagaccttttaattgatcttccatttgattattcctccaatcctttcttcaaaagctccttcgcttttttcagtctcgtttttatcgtattttcctttacgtctattactatagcaatctctttaattgataactcttcataataaaatagataaatgacttctcgatattttatcggtaaattcattactgcagaagccagttcacggtcctccgcattttgaatgacagtttgttcgacactaccattttgaacccccatataagcagcttcatcctctgtcacgatcaccttgttgttataccaactttttatatagtccttacattgattaatcgcaattctccataaccacgttttcacattcgacttccctttatatgtatgcagaaatttatagcatttcacaaatatatcttgcgttacatcctcagcaatctctttattgtttacatatgaatacacaagctgcaggacttcttgtccatacttgttcataatttcatcgataaggagttccttatcttctatttcaaacgcttctaccgttaattcatccacatcatttcctccttcccatatattagacgacgcactgtatgaaaaagttttataaatacataaaaaaatacggatggtaatgtccataccgtttttttatgaatatttatttacttcttttcccctgacactaatgctctgcttaaaaacaggaattttcatccatatatcttgttccctattttaaaacataatacaattaaaatgtaacttaataagctataactagtaggtgtggcaatcatctcttccattttgaaaaaggggggaggtgataatataatcgcgatgtttataattaaattagtgtatggtatcctaaccggagctggcgttgtcatcggtagaagatacgtcggtccgtggctaatttctgtatacaaaaaagcgagaaccaccctgcttcgtggaaaaggtaagggcggttctcggctaaaacgttaatgtaattgtcttataaccgcacctactaccaccacaatagcaagttaggttacacaaggcagaagtttctcaggcttctgtcttttttattttatgcaaaattcacactacatactctatcatcattgtaacacattttatttatttttagtcaagagaaaaaccacctaaagggctccccttcaggtggttctctattttacgctaacgcagctagactttttcaagttcagctgtgccgctctcatcatttatagcaccaataaagacggattatgtacccgcttcataacagtatgagtaaacaaggaacaacacctattacgaatataaaaaatcctctcactatatagcacctatgttttcagcaatactctattaccatcaaactaaatttgtataatttaaactacagaatagcaagctaattttcaaatatcttcttgcgcattatcctaaatttattatctatttgtatcatgcttataaataaaagatatcctaccgacgcaccgagcatatttatagcaatccgccacacatcaaaaacatcagacaaagttagtaaatgtaatatctcccaaacaagaaaggtcataacataccacttacgagctttcttatagttagaagaatattccataaaaaaagaaccacctcaaggctccccttcaggtagttctctattttacgctaacgcagctgcttgctcttgttgatctacaggaattacagcatctgttaatgctttttctaattctgctgtgtatttcatttgctcttctttgctccagcctagtttcgcagccatgtagttgattactgcttctttccactcgtatacccagtggatattgaagaatacagtgcctctgcggcgtacgaagaagtcaactggttttgctgtcatttcgtaatccattgcgtatacaagagggattagaacgtcaagcggcatgttgtattctttcgcttcgtctttatgttttttcgctaagtcaaatagtacgtcaacgttagagccgtagaatttcgcgaattcttctgcttgtgctgttgttaaaccatatttcgtaccttcgccagcttttttcgcaacaaatgctgggaatccgtgtgaaccatctacatgtccaccagagattggcatatgtttcgtgtcgctcttcggatatgcgctatgaccttctttttgtagtaagttcgttacgtagtctactaccatttcagccattttgcggtatcctgttaatttaccacctgcgattgtaattaaaccagattcagaagtccaaatttcgtctttacgagaaatttcagatgcactcttaccttcttcgtaaattaacggacgtacaccagcccagcttgactcgatgtctttttccgtaatttttacgcttgggaacatgtagttaatcgcattaatgatgtatgtgcgatcttctgttgtcatttgtggtacagctgcgtctttatcgtagaacgtatctgttgtacctacataagtttttccgccgcgaggaatcgcgaataccatacgtttatctggtgtatcgaagtaaatcgcttggcctaatgggaaacgtttttgatcaattactaagtgaacaccttttgataactgaagtacttttccttttttcgagttatctttttcacgaagtgtatctacccaaggacctgctgcgtttacaattttcttaccgtaaacttcatatacttcaccgtctagtaaatcgattacacgtacaccacatacttttccatctttatataagaaaccatctacttttgcgtagttaacagcttttgcaccgcgttcaattgcttctttcattacttcaattgtaagacgcgcatcgtctgtacgatattctacgtagtaaccgccgccttttaatccttctttttttacaagaggctctttcttcagcgtttcttcacggttaaacatttttctgcgctcgcttcgttttacacctgctaagaagtcgtatacacgaagaccaattgatgtactaaatgatccaaacgtaccgcctgtatggaatggaagtaacatccactctggtgttgttacatggggaccgttctcatatacgatcgcacgctctttacctacttctgctaccattttcacttcaagttgttttaaataacgtagaccaccgtgtacaagtttcgttgaacgacttgatgtacctgctgcaaagtcctgcatttcaaacacaattgttgataacccgcgtgttgctccatctaatgcaataccagaaccagtaatacctccaccaattacgatcacatctaactcttgtttatttactccgtttaatacgtctttacgttgtttacttgaaaatttcatggtaattcctccctttgataacgaaaaaagagaccacaaactccgctatagatttcgcctctatagcgcgttgtggtctctccaaatctcctaccgaattattaacttgtcaccattataacactgtttatgattatttgaaagcttttgttgcttcaattgcttttttccatccagcatatagctcttcgcttgttttcgcttccatcgttggttcaaagcgtttgtccatatgccactgttctttaatttcatcttggtttttccaatatccaaccgcaagaccagctaagtatgctgcacctagagccgttgtttcgttgatcactggacgctctacaggaacatctaaaatatcactttggaacttcattaagaagttatttttaactgctccgccatcaacgcgtaatgttttcagttcaatacctgaatctgcttccattgcgcataatacatctttcgtttggtaagctaaagattctagcgttgcgcgaatgaagtgctctttcgtcgtaccgcgtgttacaccaaacatagcgccgcgtacttcactatcccaataaggtgttcctagtccaacgaatgctggtacaacgtatacaccatcagttgattcaacgcgactcgcatacacttcactctcacttgcatctttaaacatgcgcattccgtcacgtaaccactgaattgcagaacccgctacgaaaatacttccttctaatgcgtagtttactttaccatctattccccatgcaattgttgttaatagaccgtgctcagaagctactgctttttcacctgtgttcattaacatgaagcaaccagttccgtaagtatttttcgccataccttcaccgaaacaagcttgtccaaataatgctgcttgttggtcaccagctacacctgcaatcggtacattttgaccgaagaagtggtaatcaattgtttctccgtaaatttcagatgatggacgtacttctggaagcatgctctttggtactgttaacatttctagaagctcatcatcccactgtaagtcgtgaatattaaacattaacgtacgtgatgcgtttgaataatctgttacgtgtgctttaccaccagatagtttccatacaagccacgaatcaattgttccgaataatagatcgccgttttctgctttctctcttgcaccttcaacgttatctaaaatccattttactttcgtaccagagaagtatgcatcaattaaaagacctgttttttcgcgaaccatttcgctataacctttttcttttaactcatcacaaatttcagctgtttggcgagattgccatacaattgcgttgtaaattggtttactagttgttttatcccagacaaccgttgtttcacgttggttcgtaataccgataccagcgatttgttctggttttacatctgcttcgcttaagcaagttgcgataactgctaaaatagatccccaaatttcttgcgcattatgctctacccagcccggctttggaaaatgttgtgtaaactctttttgagctgaatgaacaatttcaccttttttattgaataaaattgcgcgtgagcttgttgttccttggtctaatgaaagaatatattttttcatatcggtttcccccttatgctacttttctactatttgtattgcttccgctttttttacttgtcatataagagattgctagtacaatcacagttgcgataatcacataaataagtgctgaattttgttttccttcaaatacaacttgatggaataaacctgcaagtgatccacctaaaattggaccaactactggaatccatgcatacttccagtttgaaccgccttttcctgcaatcggaaggaagaagtgtgcgatacgcggacccaaatcacgcgctgggttaattgcgtatcctgttgtcccgcctaatgataaaccaatacttacaattaagaaacctacgataaatggatttaatccatctgcaaatttatttgcaccaattgctaatataccaaatactaaaacgaatgttccaatcatttcacttaaaaggtttgcaaatgtgttcggaattgctggacctgttgcaaatacacctaactttgttcctggatcttctgtttctttccagtgtggtaagtaatgtaaatatacgataactgccccgataattgccccaatcatttgtgctgcgatataaccaggtacgtcactccatgggaacgctcccttaaatgctaatcctattgttaaagctggattcaaatgtgccccactaattgatccaaccgcatatgctgcaaccgctaccgctaagccccagcccattgtaattacaatccaaccagaatctttcgcaaacgacttctttaaacttacaccagcacaaacgccgccaccaagtacgattaacaacgcagtccctattaactctcctaaaaatgctgacatagtatccctccacaatcaatttaaacgcttccaaatgtgatagaggtaaaatgaatggccattcgtttttgtcaaaagaaaaagacccacagcttgcacgcttctatataaatttatatagaaacaatgaaatgtggatctctacttttctccgtcacgtttattaacttgtctataatgttaaccgtaaatgaaagcggtgtcaacgaaaaaattcacattttcgtcactttttttggtaatgtttccatagttcgcgttttgatgtcgtaattgctgtcgcaccagcgtttaaagctctttccacatcttctacagtacgaataaaaccacctgctaaaatcggtacaccagtacgctctttcacttcagcgataacgtccgttaatgctccaggaagtacctcaatataatccggtttcgtcttatctaaaagattgcagctcttctccatcgcactcgaatcgattaaaaagatgcgttgtattgccacaacacctttttgcttcgccttcataataacgctcgcctttgttgaaagtaacccgtacggtctaaactcctgacataaatattccgtcgcatgcccatcactctgcaaaccatgaattaaatccacatgtaaaaacacctttttacaatattgcttcgcaagcgatataacactcttcaattggccgacatgaatatctaaaataacaatatattcatacgaactatgtaatagcttttccaaatctttaatttgcctcactgccggcaaaatcttctgttcatgaaattccattctctatatccccttctttatgtcatcctatcctttatagtacacaatttaagtgaaaagaacagccagtgtaggggatttctttcaaatctttcctctatctatatattttcttcaacttatccgatcccataccacctataatcatgaatgcaaggggtaaaagattcattacatatggtgcatctgctacaattgtaatacttgctccagcaaacttatttagcatccatacaacgatttttgcaataaacaaaaatactcctatcataaatagactatcaaaaaacaccttccattttggatacgccaattgcttactatcttcaattactttctgcgtcaattcttcatcaccccttagcagttcatcaattgtaataccgaacagatcacttaaatgaataataatttcaatgctcagatagttctttcccgtctcccatttcgaaacagattgcctgctcacatgaattttttcagccaaatcattttgcgaccaatttcttttttccctttcttcttttaaacgctcactaaaaatcatactgtgtttatcacctctctatgcccattatgttcaaataaatgatgaagagtaaagctagttatcgttgcatttcctgcgcaacttatgcgttacagcttataatggcgctcttttatatgtatcttccctatactatgctccaataataatttcccgaacaataatacaaggaacggatactaataaagtgaaactttaatcaaccctcaccaatcgggcttttacggacagcccgcccccccacctaacttctttgcttccgctgaattttgaggtggggtcttactgcccggcaaatagcgggataaagactagattaggcataaaaaatacgccatcccttcttatcagtctccagaaagaataacgcaaattttcatttttactcatcatttttcggactatatgaaaaccccggatatttcacaacaggcctcttctccttacgcagggaatccattacttgcgggccaacatgtatattactctccactatttctttaggagtcagtgccatccattgatttaacgatacatcttcaaaacgattacttctgaacatctctaaaaaccataatgtttcggtacctgtattttgaatataatgccccgtcgcaaacggtacatatccgacatcgccagctctataatcaaatgtacgagcggtaccatttccaagaaacacagtcattctcgcttcccctgtcaaataatattgccattcatcattattcgggtgccaatgaagttctctcattccgccaggctcaacctcaacgagcgctgctgcgattgttttggaaatagggaaatttgtagaatctacaattcgaacgctaccaccaggcgtcttaatcggattttgttttaacaattcatgtttaaatgttaaaggaacttctcctttcggtgattgaatttcctgactttcaagcgaacctggcacctctccttgataaatataaacttgatctgaagggatagaacgaaaagcactctcaggtactccgaaattagccgacaacacttcttttggcgtatgcgcaaaccaatcagaaatagctaaagtagataaatcagaaaaatgcccatcatcgaaaacgagtagaaattcacaatgttccaatccttgaatggaatgtggaataccaggcggaaaataccaaagatcacctggtccaacatcagcaataaaattccgtccattttgatcaacagccgttatgcgtgcccgtcctaaaagcatatacgcccattccgcttctttatgccaatgtagttctcgtactccaccggccgttaaactcatatttactcccgcaatcgtcgtcgaaaccggtagttctcgaacagtaatctcccgagaccacccgccttgtttcaaaatcatagaagtgtccgagaatgaaaacttcaagttaggaactaatcctgcatccgttataggcggaacaagcatattcggattttgaatatcccgcataacattacgaggtccagaatcaatcgtacctgctccgtcgctgcggattggttgtggcacattccctcccgcttcattaacagtacgtttcttcatgattacactcctttttcatccaattagtaagtaaaaagcctccatcatagtgtatgaattgggctttggatggttacagttactatggagttacatcatctgcctatcattatcgttttgttcatttctcaacttatactagtatgcttagcgcttaggaagacaaaaaaataaactagaactaacaaaaaaccctgtaaaatttattacagagtttttcaccaattatttattgttttacatatcgaatacgaacattatcgtccatttgataaatttgtaatgtgtttccataactaattcctaactcttcacttacaccaactgcacttacaaatacccctttaaatactttatttttagttggttttactaccgatactcttcgctgcctcttcaaacagtttcgaaccttcttgtgctttacttactgattgatgcattttactttcgtcttcctgatctaatgcatcaaagagaagttgaaaacaatccgcatatagttccatcgactgctttatcttcgcctgttctccctgtaactctggaggcgcttgtagattcttcagctttgtagcagttgcctttgctccacctaaactcagttgtacttcacttttcttttgtttgtatgattttacgtctgaatctgctattccttcaattaatttcattgtattttcaatttgagtagcactatttatgatatctgccttgtacctttcaacatctgaaccagttaccttaccagttgaagaactagaagaagttgaattatttgaagaagaacttggttgactacttgatgaactactgtttgtaccttcacctttcgctacagataagctatcctctttcttgccatcagttgacttactctctttttcagaagtcttattctctttctctaccttttgcgtttcttctttctttggttcagctttcttaccatcagtttcaattgtaatacaaccactcaataacataactggtaacgctaaacttactaatttctttgctttcatgattactaatacccctttatttgtaaaatgtagtgcaaacaagttaatatacttaactaataaattccccccgaataatttattaaaatctactatccatagatttcctgtatattcataatctttccatatataagattttacaaagaattacatatttggtcaaagggatttatgtagtttttaaaaggaaatttactaaacgaaaagaaaattttaatcacaaagaaaagaagctaacaataaattgttaacttctcagcttaaggaaaaaatagtatctttccttatcttctactatctagattgtggatgaaccatataccgctccctcaaaagaaaaaagctaccacctaggcaataatttctactaagtggtaacctttcaaaatttctattaaagcaataccgaatctttatcactatcctgattacgtttctcacgctcttcttctaaacgcttcatatatacttcgccttctttttcgataaactcattatccatatcttgctcttttttcgaagtatataaaaccatgtagccacttaatacaatcccaacaattacaagataaacccaccatggtaaagtttccactctacttcattcctttccttagacaagccttattagtttcactctatgaggaaagaagtggatttatgcttaaaatttttattgtggatgcttcgcgaaaaatgcttgtacatattccataaactcaattggttcctgacgaaacggtgcgtggtatcctttttcaataatatgaaacgtactatttgcaaatagcccatgatacagttcaccatttttccacgaaacactcttatcatgtcgtccccatataattaaagtcggtgccttaattttatcagcttacgaaaatgcggcgctctcgcattttcgtaagctgatcataatgctctttatcatcacgactattttttacttcatttttattatacttcgtaatctcagttacagtttgtaagtccgtcgatagcggtggtacttcataactttctttttgctggaaagactctatccctttagcatccgccaagatgagatgcgtcactgcatccggatataaatacgctaaattgagagacatctctccgcccatcgaatgaccaagtactgcgaattgatcatacccgagcttcttcattaacttataatataaattaacttgcgcaggaaacgaatactgaaaatcaactggcttagaagaacgtccaaaccctaaaatatcaaccgctataatcgtgtgatctcgtacaagttccggataaatatcactaaacccatcagaagaaccaccaaacccatgcaacatgagtaacggaggtttcccctcaccaatttgcttaaaataaatcgtctgcccatcaatttgcgccatactctctttcgtattcagcttcatcataacagtatctttcacttcttcaaccttcgcaatcggcttatcaacgaagttacatacgataagcaaaacaagcacaataccgctaatcaaataaaacttaaaccgtttcaaagttcccgtctcctttcttgagttgctatttaaagtttttacattttttggttattttatgttctctttttaattgtaactaaaacagttacaattatactaaaaaaatataactcacttctattactaatggttattctgtaactattatagttacatatttaaagtaagtcaattcttttctctacatggcctgaaaatagaaaaagggacttcatgttgaagtccctttctttgttattatagttggcttactccgccgtcgcctttattatctgctggtgctccgcctgtgtcaccaatgttaacgtagtctggtcttgctggtgctccgccaccatctcctttattaagtgcaactgaattaaaatcatgaaatcctagagataaagtaaatgcgaaccctattaccgttaatacaatttttctcattattttaacgctccttttatcatttgtttttttcttgcttctttactcatatgataatattcgctagatttttcatgattgttttcataataaaatttatctgctaagcgttccgtatactcttgaatacaatcaaataattcttctttttcaaaataagaaatcgcatctaaaataacattttcaaattcaccagtagtcgcattcattttatttaaaatcatgaatcggtattgatactcttgattttttaactgattacaaatacgtaaccctttatttattaacgactctgctttttctaattcatttagttttaggtattcgtctgattccaagtatagtgctcgaaaatgattaggagatttctttgttacttctgataagtgacggatagctaactcagataaattttgattcgcgtacaataaacctaaattatttctaaccattaatatatatttttcatgattaacttgttggaaaacattcaatgctgtattaaatgtttcttcagcgaactcgaattgttgtaaatcaatataacacaaccctaacatattctcgcacaacgcaagattaatctcataacctggttgttttaaaaaaaactcttttgctgtttttatttgatcaatcgctaacatttgttgatatgattggttataaagatatccataacgataatgaaactccgcatgttctatcggatcggcaatatatttcaataacttctcagcttgctcatactgttctttcgcttcattataatttgaaattaatgtgcaatgaaaccctttaaaaaagtgatagtaataagctagaacaccttctgccgggatttcaaaagattctactttatcaaaactatcttctctaaccccaatccaatcaactaatgcaccatatctaaaattcaacaacgcatgataaagcaatacatcctgatccacgtccaacccactaatcttactttcaatctcctctttcatttccgtggccttctctatattttgctgcaacattacacgataccaatcatctaaagaatgtttcatttgctcccgcgttactacatctgctcccatacactcgcatccccttttctccaaaattacaaaattaggatttttatacaattattaaaattgtatattaccactccttttctatgcattgaaaaataattatcagaaaatttaatattttaattaattacaccaaagttttcctttttaataacttgagaaataattgtcagaaaacttactaggataaataaaaaagcaagtagttccagcactccgctaaaactacttgctctcctacttactatctctatttttactctttaataaattccttcgtacttctcactgtatcaattggacgaactaatttttcaatttcttcacgttttggctctaggaatggaggtaaagataatttttcgccaagtgtttcgtatggctcatctcccataaatcctgggccgtctgttgcaaattcaaataagatttgtggtgcaactcttgtgtataatgattcgaagaagtgacggtttacatagccagatgaaggaagtccaacgctactgattctctcaatccattcttctaatacagcgcgatcttctacgcggaatgccgcatggtgcactgtaccaaaaccttgttgtgcttcaggaagaactgtattatgttctacaatgacagaagcaccgtttccacctttattcacttcaaataaatagaattctccttcttgcgcaacctctttaaataataaaactttttctagcacttctttgaagaaactaaagtttgcaatacggatgaatacagggcctaaaccagtaattgcatattctaatggaactggtccgttttgccatggtgtacctgattctataccgttatcaagctcatctgaaattaattgatattgttggtcatcaaagtcaacgaaagaaagagttttcttaccaaattgctctttaattcctgtatgttctacttccaaacggtcaaagcgtttcacccaatacgctagtgctgcatcagtcggaacacggaatgaagtttttgaaatttcattcgtaccgtgtacacctttcggaacacctgggaaatcaaagaatgtcatatctgttcctgcactacctttatcatctgcaaagaataaatgatacgtttgaatatcatcttggtttactgttttcttaactaaacgcattcctaaaacgtgagtgaaaaactcatagttcttttctgcactacttgtaatcgctgtaacgtggtgaattccttttaattggttcattttatattcctccaatgttttttaatttatattttctctcctattacttctcttcaataggtgctaaattcgcttcaatctctgcacgctgatcttctaagaacggtggtaaatcaagtttttctcctaaatgttccacatctccatcaactgtaaatcctggtccatctgtcgcaatttcaaaaaggattccgtttgattcacggaaatataagcttttaaagtagaaacggtcgatgattcctgaagaatggaagcctctttgtttcacctgttcttcccaataagcaagctctgcatcgtttttcacgcgaattgctaaatggtgaatgctaccgcggcccggtttttcagtaggaccatctaaatatttcacaacgatttctccaaaagcctctcctttaatggactggaaaattgcttcttgatcatttcggctaacctctgtataaccgaacatctctgtaagtgtactcgccattttatcaagtctacgaactgtcatttctacagaacccattccttgaatttgatgctttgtaggaacttctgatttctcccaagtttcccagtgctctactttttctccgtttgaaacgagtaatactaagcgaagaccttcagcatcctcaaattgcaaagcaggacgatttgcatatgttgttatttcactatgtttcacatcaaatttctcaaatcgttctttccagtaatgtaagctatcctctgaaggaacgagcaatccaattcgagtaattgcatttgtaccgcgatatgttcttcctactaaaggaatttcaaaaaatgataattccgtacctggacttcctgttttatctccataaaataagtggtacattgacggatcatcttgatttactgtcattttcacacgacgtaagccaagcacatttttataaaagtgattattttcatttgcatttttcgtaaccattgaaatgtgatgatgccctttaattttatacatttgtaattcctccacttcgttttactagtcaagtgatgataaaaaaataatatgttttttagctgttcaatttattctcattatgtttttgtaaattcatcttggtttttactgcataagttactttcgtttttaactcgaaaacaactgagtgtatgtttttcatatgactcaatcgctttcgttactatcactttacaactcaagtgattaaaaagcaagtaatttatctcaaattcgagatatttttttattaaataacattttggactaaaaacacgagaaattcttggtttgaggacattataaaattcataagttgatggatgtgagatatcgccagcatttttgaaaaaaacacgctaagagtatgcgagattttatacagttttttcgttaatccaataacagacaagaaccctaaaaccgcaccagaataggaatgtataaaaaattgcatagattgatagaacaaaaaaaggaggttcccttgtgagagtagggttcctcctttttccttgctaccgataataggacgttatgttaactgatcatgtataggatattcatataggaattgtttctatcaatgctgaattatacaaagaaggaggcatgataatgaaaaaagaacaattaatattaattgctagtcttactcttttatttcctgtccttgaatttttcttccagaaatatgattacttcaatttttacgcacatataggtattatagccattgctgtatcaactgtcgtattcacactccattatataaaacaaatttattggaaattatcgatcgtatgaggaaattatgaaagaatagaatttaattgaatatgttttctattacccgtttcaagcttttccccataccttttactgcccatactagtttaaggaacactttaaagatagcatcccatacgtgttcattaataaaaaattcgtatactttctttaaccactctttcggggatttactcttacgtttaaacctttgccaatgcgtttcttcactagttttcataactaccccttctttcttaatcgaatatgctttctattagaagttttaacacctcgctataatgatgaaaagaacgaggtttatcatatctggcaatttaatcactcctaattttaaattaaattcattatataacgatttctaaatttttagttaattactagtgagaattaagcaaaatttaaacaaaaacacctatgttaggctttagttagaggttttccccctataaaatcaactatttgcgccaccaactatggggtacgcgaattactttgatattatctttgaacgaacaaaataactcctttcgaaaaacaaatgaactgatattaatcaacttccaatatcgagaattatgtaaataagctgcccatatggacagcttattgtattttttgcttaacatattttttctgaaatgctggcggtactcaatttaaaagttgatatgcccccattctagtggcaagatatgttttattagttcttcgttacacccatgcgtacttcttaactattttatttcatttttaataaagtgaaactttaatcagtgggggttttcttcaccccccactgattatcagccctcaccaatcggactttaatgacttaacattatgcttatcttaggagcaaggtattttatcggtgagtgtatacaaaccatgtaatgcttgctgttaataatgctgacgaaatcaaagctgtaagaacactatatgtttgccacataagtattgttgaccaatcgaaagcgcagcacagtatacccagagcaatcgtagcgatcaggaaaataactgttacggttattctcttttttgtcattggctgtcgctcattcgttctccttctgcgtaatcctaagagaaatagcaaaacggccaataggcaaaaaataattgtgatagacgacaaaatgatatccaaaagctgtgtgccgcttatttcatatgactgagttagattgccttctaatatatctttaacttttagtaccatgtttgtattggtatttgtgccgttgctcagcaaggagacggctgttcgttcatttggcagtatgactacttcggttctgaaatttggattgcccccagtgtgttctataatcgtttgttcggcatttacggaccaacctgccgcataatacataccgttgacagccgaaacagacatatcaccctatgtgatttttcgataaccgtgtgaaatatttcgggtatgtcctgcacgatacccatctgtatgcccatccaacgagccatatcttttgtattagaaatgatgtagcctgcgggtttattcccagcataatccggagctttaaatggagttgtcataaaaaaggaagaacggtagccctgtgccaactgtccagtagcttgagcatcttctttataaacatacgtctggtgaagacctagcggctgaaatacctgttccttcataaagtcttcatagctttgtcgcgacacaatctcaataaccaaacccaatacgtcataattaacggttccatagttatactgttcaccgggagggaacgccaattcagcatcaacgagcatttccacagtcttttgcaacatatccggtgtattgccttgtggaatattttgaagatgcctaatatttgttagaccactggtatggtgaagaaagttatttagtgtaagactttgcatatcaacaggtttcccttgatactttaatgtaaaccaaggtaaatatttttggacagggtcagtcattgagagcagcccttgctcttccaatagcataatacccataccggtaaaagctttactgaccgaggctaactcatagagtgtattttcacttgcagacacccccttttcacggtctgcataccctgaagaaaagtagaacacttcatcatcagcaagtattgagattgacattcccggcacacctgatatacgacaggcatcatctagcaacgcttgtattgccgcagattgcgaatctgacaacgcataactttgtgttgcgaatcctgagaataatataaatatcgttaatacaaaaacaataatctttttcataaactctcccttttggaaaattataagagaataatataaataacctccttttacaactacgaaactaatttttaatgtatctttctattcacctatataatatcaaataattgcgaatagttacacttgaacgaacagatggatgtaatttgaaacaactttaaagagccttgctacgtagaatgtagtaaggctcttagctttttaataatcaaaattcaataactttattatcattatacaacagccccactaagcgtattaacacttaatgaggccactttattcacactattaattatggaacgtcggtttatagaacgaacgattatcaagtgcaaagacacgctctgtgtattcgcctggttttgtgcgtcctaatgcgcggtccatcatgttcatttttgcatctaagttatcgatgtaatgcagaatttctgcttcttttactaatggtggttttgggctaccccattccgcttttccgtggtgagaaaggacgatgtgttgaagaattaatacttcttctgcatcgatttgcaattcgtctgctgctttaccaatttcgttcaccataatagaaatgtggcctagtaaatttccttctaacgtatacgttgtagaaattgggccagatagttcgattactttaccaaggtcatgtaaaataacgcctgcatatagtaagtctttatctaacgatgggtatagatttgagatagctttcgctaaatcaagcattgatacgacgtgataagctagtccagatacgaactcgtgatggttctttgtcgctgctggatagtctaaaaattcgttttgatgcttatttaataaatgtcttgttagacgctgaatgttcgggtttctcatttcaaatatgtattgcgtaattttctcaaccatatcttcttttttcactggtgctttttctacgaagtctgagatatctgttacttcattttcattcgcaacacgaatttgtttcacacgtaattgaatacgtcctttgtagtttaaaatatcaccagctactttcacgattgtttccgctacatattgtttctcaacttctggtgatacgtcccatagcttcgcttcaatgtctccacttggatcttgtaagattactgttaaaaatggctttccattgcttgcgataccttttgtcgctgttttaattaacaagaaaatatcgacttgttcaccaacttcatactctgcaattttctttttcattcgaattcctccaccaaatcagttacttttagtatagcacactacaactcattttctttacgcatatgtgttaattttataatctgtttttctggaaaatacgcaagtaaatgcgcatgacatgtaaagaatatgacttgtctatcctttgcaatttcctttataagttcaatcgttcgattcgtccttaccgcatcaaaatgcacgaaactatcatcaataataaatggataatcatgttcgaatgttttcgcgagcgcaaatctcagcgataaatataactgctccgctgtcgcttggcttagttcatgactgtaaaaacgcataccatcgttacgttcaacgataaacggttctgcctctgacggtgaaaagattttactatagcgtccgcctgttaaatagacgaaatactcttctgatttttgtaaaatacgaggaagatgaacttcatgataatagtgcttcgttttcgttaacactgtctttgcggccgcataagcagcccacttcttcacttgttcacgcacttgcgcttttttcatttcccattcatgcattaaatcgccgtacgtactaccttcttctaaattcgcaatttccatacgatgtttcgcaatacgctctgtcagttctttctctttcgtaagacagttttggacagttgtaatttcttgctttaattttccttcataaccgtcagcttcataatgttcagctaatgataaactcgttaaacgttgttctaacagatcaatttgcggcaataaacgccccacttgcttctctgcatcctcacgtttttccgctaatttacctgcttctaaaaacacctcttcatctatagactctgcaatatgccataaaccatctcgttctattagtaattgctttaattgttcttgcataaactcatattcttcttgccattccgccagtttttcttttaactgcttacaagtttggcgcttctctttctcattttgcatacggctttgtgcctcgtgtagcttactatactccgcactaccgataacagtttctagtttatgttcaaattgcgaaatcatttcatataatgaagattttcgcgtaccttgcttctctaactcccgatataattgctgcattttttcaatacgctcaaacgccggcaagatgtgtgcatacgtataaaattcaggaaacatatagcgcgttttatatgcatcgacttgttctcccgcctggaacgtttctctctcccattcctcatacgatgaaacgactttatcatacgctcgttccaattgctgtaacttataagactcgcgctcaaataacttccgaatctcttcatctttttctaactgatagcgaacagacatcgcttcttcactttgtctcccgccagcactttgctgaagtgtaaggagctcttcttgtaatccacttgatggatctttatataaaacaagggcgagaacaatccctacaaaaacaatgacactaataaataagagcgctcggttatctataaataagcttgtgaataaaacgcctgtgttaataagaagtaaaagaagacaaactctttgccactgctttttcttttgcttagctgctcctgctttctcttcatacttgcgcttcattctctctgcgcccataccgataaacgccgcatcttggaacgatttctctttctcaactaacacatttctctcttcatccgctaacatttgtttcttaatctgccttatattttcttcttgttcttctaattgctcttgcgctactttaaaacgatcatcgagctgtgctttttgcgtttctaattcgcgcgccttttgcactgtttgcgtaattaactctttcgttgccaaactcatatcaaatgaaagaactgtttccttttcaaaagtagcaccaatttgttgttctagttctgcgatttcttcttttatattcgtaatacttcctgtcatatcacgcatttcttggcgtgcattttcgtaagacatatgctgcatacgaagttcttctacataactttctttttgtaaaaactcttcatctatttgaatcgaggcaatttccgattgcactgtctcaattttcttgtggagcgaatcaacttgtaattgaagcggctccatcttcgccttaattgcttcataacgcgccattccgtttacaggaaactgcccgctctcgttctctaacactttctcgtgcgcacgcttttcaataacgagaggctcaagcgctgctaatatttcataatcttgcttccgcttttctgcattctctttttccacgcgaacagaagcaagtttctcttcactttcttttaactgctccacttgcttttcatacgtgccaattttcccttgccactctttcatcttctcttcaagtttcttcatctcttgcaatgacacgttaatttctggtttacgaccactcggcttgaagcgctggtccatttctttttctagctttttatctaactgcaatagcgcatcacttccgactgcacttgccgaaaataaataattgccaatatctgcttcgccaagctgatgaatgttttgaaggccatgcatatcaaatgaaaagacagattcaaataaattttcattcatcccgcttaatatatcgtttaaaatttcttctccgcccgttttcccgtcttcaaaataaacggtcacctcgccagctgccgtctttggcaatcgctcaattttcaaacgaccgtactgctctgtttgcacagtgatcgcaccgccatacttcccgccttctttcggctcataacggcgctgtcctctcgtcggaaaaccgaataaaatacttttcataaatgagcgaattgtcgatttccccgcttcattttcaccgtataacactgtcagcaaggaaagatccatttccacattttctaattttccgtacccataaatatggagtttttcaattctcattttttatccctctcttgctggaataattgttctaaaataatattttctgcttccttttgaatctctttcttctcttcttctgtaaaagattcaatactattacgcgctacaggagatgtccaaatagtgcgcaatactccgtccatattagtgaaagcttctaactcctttagcacactaccgacgaaatgattttccgctttcaaacgttcgatttccgcaaaagaaaccgtctcatttttccacttcattgcatatacgaaatcttttcgctcttctccagatgctaaaatgtgaaaaatctcttccacacgcttttcgtcgcgcaaataaggtgaaagtgggccttgtcctgtaaatacgacagttaatagcgtaccttcctcttctcttcggcattcattcatcgcagtagatatgcttgtcataagttcatcaacagtgtcaagtccatcaataccaacctcgatttcgtcccatacaacatctgccgtatggaaaaatgaacactgcgatccttttttcgtaagttcaataaggtatgcacccttctcgcctgtttccttacgatgacgaccttgtatgttccctggataaataatgtatggttcttctgataaaatttcacgtttatgtatatggccaagagcccaataatcaaactgtttttctttcaactcacgaatttgaaacggtgcatagcgattatgctctgcatctccttccacactaccgtgaagcataccaatatgaaaaggcgcatcactcattttcgtatactgcgctgtcatattatccgttaccgcttgctgcaaataactaaacccgtaaatagaagctaacaattcaccatttttataaaatgatttctcttctacataaggctccgtaaatacatgaacattttctggaaactcaattgctgcccagcttccccctaaatgatcatggttaccgtgaataataaaaacagggatatcgtattgcgaaagtctcttcatttgctcacgcacaaacacttgcgccctcaaacttctcgtctccgcatcatacaaatccccagctagtaatacgaaatcaacgcgctcttgaatcgctttatcaacaatacgctcaaatgattcaaacgtactttgcttcattctctcccaaacagactgggcaacattcatctccatccctttaaacggactatccaaatgcaaatcagccgcatgtataaactttacttgtttcacaaataacgatcctttctatctttcaaaagtttcatcttatcaaaattaaaatcgctgaaaactaataatcaccgagaataaaaatattctcgatgattaaagtttcattctattttaccacgcaatgtcatatatttctttgcatattgtagcgttttatgtcaaaataattataagattctgattttaaatattggagggaattttcatgggagtatacgttctaacagtctttgaaaaagatggttcaaaagcattagacgaatcattcgaggcggcaactgaaaaagaagcgaaagcaaaaggtgaatctatcttacaagaaaaaggattgtatgaaaaaacacatcgctgtacatctactgcaggtaagctcgttttattccagcgctaaaaaaagaagcgtcatccgcttctttttcactctactatatcttcgtcacaccacgtaaacaccacatctagaatgcgattaccgatacgtacgcgtttatcccatttacctgtttggatctgatgttgcaattctgctttcatcttttccgtccagtcgtgaatcgtttcactaccgtcgtacggatatacgcctggaaactcttcctgcagtaaatgcaagctctctgcatcaaaatgaaaatggaagaagtagtttgctgtaagcgatggttcttgcaatcgtaaaaaatgatcatcaatttgctttctatttcgatagaaagtaaagatattcactttaccgctcgtaatttggtcaatttgaatttcgtgcttctctataatcacgtcttgtccacctcgttgtatactatctttagtatatatgtcttttgcaacaaagttaaccattttcgcgcgaaattcatttccttcattataattcctgtacctccatattcaatcaggataaataaaaacaaagttgaaggggagcgatcacatgtatttcggaagcaaaggttggtatgtaaaagaacttaaaaaattaggtatccgtacttatgaaggtaaaaaactagaatcttatcgtacgcatgtgttgtctagtttacttgagagaatgaagaaggcttcggcttaatagaatagcaagaagtaaacctgaatattggtaaatgataaaaaacacctcctaaattcgcatactaagtatgcaaattaaatggaggtgtttttattagtttcactttttcaggggcgcttcagttttcataaaatattttttgtttccgctgaaacggataagttttaatctcagctgtatctaaattttcatggaataaatgaatagctataatttgtctacaatcgtaagtatggtaataatatgttccagattccatacacattgcactcgtatagatggtattatctaatgttccgtcttctgttattactgaccctttaggaacctcacaatttgataagatatgaaaaatagcagatatcccctcttcttcgttctctataccttgaatgttttgttttccatatgctgcccgcacaaatcttgatggcggggtaaaatctccaggaagtcccatcgttcctgaaccttggccaaaagcacttaatggtacatctccccactccgttggcgcaaatggctgcgatttaagtccaatatattgtcttaaattttgtaaatgccaattaaactccggactattagtcatcactcctaatggattgtcatacatttttagtccatcagttgtcggctcaagtacaatacactctccccatttatctgctaaaatccaatgtagcggcggagtaattcctaaaactggtaatggtatatctataagggaaatgttatcaacagatttttttaactcttcaacagaattaaattgcgtgaggctccaagctacaaaatcaaatggcgctaaattcgttttatggttatctatactgttactataagtagcgaatcccgggaaatagagagtggcacacgtcataccagcttcatttactccgtccgccataatgacccttccttcatgattaattcccattccgacaacagcctttttcgctcggatagtttcaccagttatattgttccactgataacgccgaggaatgattattacttcctgattcatatctaatgtgaaatccattgttctcgcaaaaagatgttggaaatttttagtttgtaacgtcaaactagtacacatgaagaaatccccccattttatagttatatacacattttataaaattctgataaatacgtaaattaaaaaccctatttatcactaacaaagtaaccatccaaactaaaaatgctataataaacccaatcaaactaagggggcaaattactttgcttggaacatgcattcaatttcataagtttggcaatccaaaagacgtattacaagttgaatataaaaatatagaaccactgaaagataatgaagttttcgtccgtatgctagttagaccgattaatccatctgacttaattcccatcacaggagcgtacgctcatagaattcctttacctaacatacctggctatgaaggtgttggtattgtagaaaatgttggcgcttttgtttctcgagagcttatcggtaaacgagtgttacctttacgcggggaaggtacttggcaagaatatgtgaagacatcagctgattttgtagtccctattcctgattccattgatgatttcacagcggcacaaatgtatattaatccccttacggcgtgggttacttgtacagaaacgttaaacttacagcgtaatgacgttttattagtgaatgcttgtgggtccgctattggacatctatttgcgcagttatcccaaattttaaatttccgattaattgccgttacaagaaataataagcatacagaagaattactgcgccttggtgctgcatatgtaattgatacttccactgccccgctttatgaaactgttatggaattaacaaacgggattggtgcggatgctgcgattgattctatcggaggaccggatggaaatgaattagctttttccttacgtccaaacgggcattttttaacgatcggtcttctatcaggaatacaagtgaactgggccgagattgtcacaaaagcaaaagtgcacgcaaacatatttcatttacgacattggaatgatgaagtgtcaccatataaatggcaagaaacgtttcgtcacttaattcgtttagtagaaaatgagcaattacgttttatgaaagtccattctacgtatgaattagcggatgtgaaagcggcagttgatgttgtacagtctgctgagaaaacgaaagggaaagtgtttttgacgagttattgaatgccataaaagaatctcttttagtatctcggcttcaactacctaaaaaataacattgtcaacacaacttaaattggttatcataaaaacgaatataacaggagatgagcagatgaatatgaacgaaaagaaatccttttcaaaagtttctcggcgaaaattagtcgatgaagtattggaacgtctacaagagaaaatcttttctggcgagtatgaagttggtgatcgcctccctacagagccgcaattaatggaagagctaggggtaggacgttcaacgctgcgagagagtataaagatattagtacatgctggcgtattagaagttcgacaaggacaaggcactcgtattgtctcattaaatacaacgcaagattcatttgaaaaaagactgcaagcagctaatataaatcatgtgtatgaagcacgaaatatgttagataaagaagtagcaatgttagcggcacaacgccgaagcgaagaggatcttttatatttaaaaggacatttgaataaaagaaaaaatgcccttcaagaaggaaattatgtagcatacatagatgcagacattcagtttcatctagccattgcaaaggcgagcaaaaacgaagttctatttgatttgtatcaatctttcgtacctgcccttcgccatattttaagtcaattaatattacatacagcgaactatgaagacaactctggcattcatgaaaagttattccaagctattttaaagcaaaataccgaagaggcgcgaacatacgctgttcaaaatttggagctgaaataagctccttatctattacacaaaaacgtcagatgatatactcaataacatctgatgtttaagaaaggagaaaatgaaattgaaacagcaagaacgaacttatttgtatatactagcactattttttgtttccattaatttacgtatcggaattacatctgtttcacctttattagaaacaatccgacaagacttaaatataagcaatttttccgttagttttttaacagctattcctgttttttgtatggggacattcgccttactgactgggaaggtaattaaaaaatacggggcagaaaaatcaattatgacttgtcttattttaatcggcttggcaacatgtatgagagcttttaccttttccatttccacattattcgcgagttctttatttatcggtattggaattgcacttgcaggtcctttactatcaggttttattaaagaaaaattccctacaaaaattggcttaatgattggcatatattcagtaggtatgggaactggcgcttctttaagtgcaggtttaacaatccctttacaacatgtattaaaaagatcttggaatatggcactcgctttttggggtgcactaactattatcgctattatgttttggtatcctgttatgaaacgaaaaaagaagacgaacacacaaaataaaagaataataaattgcctttaagaaataaaaaagcatggttatttacaatccttttcgggctacaatcaggaatcttttattccattacgacttggcttgcgccggcaaatcaaagtatgggtgtgagtagtaagcaagcaggtactcttataactgtttttaccgtgatccaaatgatatgtagctttttaattccgacattagcggatatttataaaaacagagcactttggttattagggagtatatgctttgtaatcgtaggtttatcgcttatgatttacccactaactacaccatggatcccttctattttactaggtatcgggctcggcggcgtatttccactcgctcttatgctgccgctatatgaaacaaaaacttcagaagatgcaagtgcatggactgctatgatgcaatcaggaggatatattatgggcggattcattcctgtcctagctgggatagctcgtgactattttgatagttatacgcaagtttttattataatggcacttttaagcttaattttactcctattaactttagtcatgaataaaaggagaagaaatgcagaagaccttttctccgcttaaatttaaaatgttaatatatggtataatttaattaaaaaacgaatggagcttctaacatgtggttcatttcggcaatttggcctattatactagtcgggggaattgtagtatttgtaataaaaagattggaacataaatataagcacggcaaattaggtaagaaaaaatcaaaaaacactcaaattttattagacagtttaataccaatggcaatgcttttagggtgtttgatcggtattattgtcggcatattttctcctgattctttactactttcaattagtttaggatccggaataggctatttatttggtttttttgcctatgaattttatagcaagacaggaaacaatttttcctaatccaaaaggaataagcgggacagtacatagtaatcatatgaaatatgtaactgtcctttatttttgcatcaatgttatcaccttacctttcgcctactatacacctcttttattgatttttctctcctcccctttttgcatatccgcttttttattttcattggatctatatccaaagtaaagtagcgcacatgtaataacagaacctacaatgtatcctaaaaaacatcctaaccaaaacataaaaattgcccccaatccattataaattttatgtagtagacatctgtaaaacgttctcggtacctccgttttttattacagattggaaaatccccttaaccattccatccatgaacattctgtcttctctattgtgattattatctataaagttatttataccactaattcttccattatctcaaataacaactttattatttattataaagtttgcactcacactacatatatgtagcatcactgtctctttttcattttacccttgcaactggagtttacttctacaacttaaaaacaaaaaaaaccctcaaagcataaacttcaaggggtgagcctgttttttatttacttatatacgtacagctgtaccacttacagcaaccattaacattccatcacgaacaacttcataatctacgtcaataccaacgatagcgttcgcacctttttgtcgtgcaagttctttcatttcatccattgcaatatcacgtgcgtcttttaatttactttcgtaagcaccagcacgaccaccgacaacatcacgaacggaagcgaataaatctcggacaatgtttgcacccataatcgcttcaccatttacaatatcaatatactcaataatttctttaccttgaattccagaagttgttgttacaatcatgactgacactctcctaataagttgtagttttaattagctttcttatgtctttattatgacatggaaaaagtaactaatctattgaattaccttacaggagtgtgacaattttgtaataataaaatgcgctttatgtttcattttaataaagcgctttaatatttggatacataaacgagtctctattttctttccaatccttttctacttctttaaaagttggtcgccctaattctttattattttcatgtttactaaaccattttttcacatactgatctccatttttattttgaactgtgcaaaggaaactattactactatcctttaatatttttacaatcacgaatagacacctcttcccttctcaatatcataataggacttgatcttttactataagcccttcctctcttatagtcatacgactcctcggccgcgccaaagttgtaagatcaaaaacgatattcactttgtttacattttatttaaagaaatcagagttataggcattatgcttatcaaatattttatagatttctaacttatcatctaattttgcatctactaaaattaatatatttccatcgtaaatatattcttcatactttttagcatggtcttcagggattcctaagccgataaatgctcctattaaacttccagctcctccgccaataccggctcctccaatagctgctgcgattggtcctgctgctacaattggacccattccagatacggcaagtataccaagacctgttaataaaccaccgagcccgcctgctactcctccagctacaagccctgtcgctgaaaagatatctgctttatgtgcagtttcgctattcactttttcacccgatttttcttctagatgttcaatttccttttgatctttcgcaatagctgaaatgttatctgctgaatatcctttatcatttaattcattaataacgagtgctgcatcatcaattgttctaaaaacacctactatttttctatctacattcataactattaacctcctaaagttttatataatgtatttttatttttcttcatttctgtatacactaattttcttattaacataaccatttatgaaaaaagcgaatagtaaaagcactacaagtgaactacttaacaagtaaattaaatcaaatgtaatattaatcatcatttcattcatgtataccaggctcctttttatttaaagtaaaagtatattttgatagactaatctactaaacatagacatcttacaattcatcttcagtcaatctctttgtagtatatgtatacccttcctaaccttttctaaacgtaaaaactataattatattttttcttatttatgtgtttaacattttttaaaacgggtatgtttatattgttatgcttactatatggaaaggaatattacgatgaacgccattcactctactactatttcttataatgaaatacctacaataacgcagattcatcatttttatgctttaatgacaacatttcaaacgaatgtatttataggtaaacacggagcacttacttctattaaaaacttaagcactctagtatcctttttccttactgtaaaaaagagagatcttgtattatttatttttgaaggaatagatgcaaaaagagctttaagaacactcttcccttcttagaatatttgttatcctctattccctcgtttactacctttcatatatgtttttatatttcaaaatgatttcccctattaaaaaagaaccccctaatacaatagggggatttctagtttagccttatgaaaactgatataatatatattacgtttttcattctttaaaatagaaaagttttaataaccttgaaggtaggaatttttaatgaactcgaaagcaaaatttagtattcgctacaaaattatggctggttatttagttatcattttgttcttacttgtttctttcattatgttgaacaatgagatttctaatttacaaaaatctcgtaattttattattgatcacgattttaaagttctcaatttaacaaatcaagtggagaaagatttactaacaattgaaaataaagcgaaagggtttatcatttctaataatccaaattacgtacaatctcttaattctgcggaaaaggattacgaaaagcattatcaagatcttttctcattattagaggataacccatctcagcaagaaaaattaaaacagattaacgaaaatattattagttggataaataaagagattcacccgttaattgcaaatcataatagtaataatgtacaaacaatcgacacgactcaaattcagtcattacagtcacaggtaactaacttccgtagcactgaggagcaattaacgaaaaaaagagcagcacaattagatactgaaaataataaattagaaatttggttatacagtttattgttcttactttcttgtatttctattatcatttcactctatatttcgaattccattacaaaaacgattaaaaatgtaattcaagctattaaatccatttcttctaaagaaaaaatcacggaaagaattcatgtaaacacacgtgatgaaataaaagatcttgctcatacaacgaatcacttactagacgaaatatcgaaaagagaatggttacaaactgagcttgcagaattaattttaatgtatcaaggtgtatcttctattgagatgttaggtaaaaaaattcttagtggaattatacaaaaaacgcaaacttcttgcggagcattttatgtacgtgaagaaattgaagacactgtctactatgtgaagaaagcttctttcgccgatcaaggtgctgatattgggaaacaatccattcaaatgggtgaaggttttattggacagtctgccttagaaaagaaaagttttattctcagggatatacccgaagagtttcgttatgtcactagcggagtattagaaatacgtcctaaaaatctattaatcatccctatcttatttgaggataaagtgatcgcagtaatggagttagtaagtgtaactgagatttcagatttacatcaagatttaattcaacaaaccgttgataatctaggtttaacaatccatagcattatgggacgtatgcgaattcaaactcttttacatgaatcacaagcaatgacagaagagttacaagttcaatcagaagaattgcaaacgcaagcggaagaactacaaatgcaagcagaagaattacgaacaacgaatgaacaattagagtctagaactgaagaggctgagcagaaaacagctgacttacaaattactaaatcagaattagaagaaaaagcaagcgagttgttacgcagctcaaaatacaaatctgagttcctagcaaatatgtcacatgaattacgcacaccgttaaatagtattttactattatctgaaatgttaagagaaaatcataataacaatttatccgacgatgagattgaattagcaactgtcattcattcatcagggaaagacttacttactttaattaatgacatactcgatttatctaaagtagaagcaggcaaactagacatcatttttgaagcaacgaacataagtgacatggcagccaatatgcatcaaaactttttacatatagctgcacaaaaaaatgtcgaatttactattgaagacagtgatacgattcctgatctgttttatacagatgcaaaacggattgagcaaattattaaaaacttattatccaatgcatttaaatttacagaaaaaggatccgtttctttacatttcgattcgatagaaacaagtaatttaagtcatgatatgcagtctataagtaaagattggattacaatttcagtaaaagatactggtattggtatcgctaaagaacagcatcaacttattttcgaagcctttcaacaggcagatggcgcaacgattcggaagtatggtggtacaggattaggtttatctatttgtaaagagtttgctagattgttaggtggttggattacgttagagagtaatgtaggagaaggtagtactttcacggtatatattcctaaccttccaaatggattaccagatatacagttatccaatttagaagtcgcagcaacgatagaagatgttattcctgctgaagttgttgaagaaactatcgttactcccgaaacaaataacgtcttccaagagaaaaccattttaattgtcgatgatgatcatcgaaatatatttgcgttacaaaacgcattaaaaaaacaaaatgccaacattattactgcccaaaacggcttagagtgtttagaaatactaaaaagtaatacaaatattgaccttattttaatggatattatgatgcctaatatggacggttatgaaacgatggaaaatatccgaatgaacttagggttaaatgaaatacctattatcgcattaactgctaaagcaatgccaaatgataaggaaaaatgtttatctgctggcgcttcagattatataagtaaaccattaaatctacatcaactctattcggtaatgagtgtatggttaataaaataagtgaggtttagttggagtggaaaataagtattataattttgatccatcagtagatacggatgagcgcacgaacttagaaattgaattactattggaagcggtatttaaactatcaggatttgattttcgccaatatgctcgcacatctatttatagaagaatttgtaatagaatgcagctctctaatatccctaccatttcaaaattaattgaaaaagtaattcacgaggaaggggttttagaacagttattaaatgatttctcgattaatgtaactgagatgttccgtaaccctgccttttttaaagcgcttagagagcatgttattcctgaattaaaaaagcaacctgaaattagaatttggcatgctggatgcgcaactggtgaagaagtattatcaatgtccatcttacttcacgaagaaggattaagtgaaaagtcggttatttacgcaacagatatgaatacaaatgtgttagaaaaagcaaaacaagctatcctcccgttaaataaaatgcaaacttatacgaaaaattatttacaagctggcggtacacaagcattttctaactattattcaacagataatcgttttgcttattttaatccatcacttttacaaaacattatttttgcacagcataatttagtaaccgatcaatcttttaacgagtttcatattatactttgtcgtaacgttttaatttactttacaagtaaacttcaaaatcaagtgcagcaactattttatgaaagcttaggtcacaatggttttctatgtttaggaaataaagaaactcttcgtttttcaaatataatgccgcattatacccaatttaatcctagcgaacaaatttatcaaaaaatacaataaaaagcgtatgaaatcctctgtttggatttcatacgctttttatttcgcattcgtttgtatcataattagacacatatcatctgattgcgctttcttttgttcttccttgtaaaacccttctatctcgccttctaaatctccccattttctttctgtaaaagtacgtaatttctcttcagcctcaaattcatcatttgcaattgcttcaagaacaccatctgtaaacaatacgatttgagcgttcttctcaaaaggtataactgtctttttaacttttatttcatcaaaaaatcctaccgcacaactcccgtgatttagttcaaacatatttgtttcatcgactaaaacgtatccagaaggatgccctgcatttacatattcaatcgttctcttttctgtatctactactaaatatatcgctgtaaaataatatggaatatcgtcattctcattatgtaaaagagtcatatatttatttaaatctttaatgacaagttctggatcgattaaagatttaatcgtttcacgtaatacagacgaaataaacatacaaactaatgaagcagatataccatgtcccatcacgtctaataatataataccgtagcggttttcatcgattttataccaataatacatatctccagctaatttaaatgaaggtaagtaacttgcttcaatttttatataatcttctcttaatgggctacttaataagtttctttgtacttgcgtagctaaatctagttcattccgaagattttcttcttgttctttatgccaatttaattccgatttcaagcgtaacgctacacgcatacgtgctaatagttcaactttatttataggtttcgtaatataatccattgcccccatatcaagagcttcggccaacttattggcatcctctaaagctgtaacaaaaataataggaatatctttaaacttctcctctttttgtaatcgcctacaaacttcaagtccatcaatttcaggcatcataatatctaacagtattaaatcaatttcattatacctggaagaatcttctccaaattgaatgtattcgaaaagctcttgtgcagaattcagcgatacaagatcctgatatccggcttgctttaaaattttttcaattacaaagatgttaaccggattatcatcgacaattaaaatggacacaagttatttccccttttcttatttaaaatgtaaatctattatcattttctagtattgcatactcagttacaaaatgaaaatttcctactctaacataatttttatacagcaaaagaacaaacccccagaaatgagagtttgttctttcattctataaatttccactattaatttaataccattgctttgtcatttaaaagacgatctaattcttccatatgatttgtttcatctgcaatcatatcttctaactttacaactaactctgtcatatttaatttcgctgcctgttcttttctcgtttcataacgcttaattgtctcatattctgattgtctagcgtattctaacatttctctaacatcttctgcttgtttcactcgtaaagggattgtagtaggtgtaccacctaacgtcttaattttctccgctaaatatagggcatgtccttgttcatcactaatttcagattcaaagaaaggttttaacacttgtctatatataccagaaactgtagctgcattatggttatacataataattgctgagtattctcctgctaaatcttcattcaatccttcgattagttctttcacatcgtgtgacatttttatatctcctcctatatttaataagtaccccttttctcatgttttaaacataatgattttaaatttttatgtatctaaaaatgctgcttgcttcaatttacttatcgcttgtcttttaatacgagaaacgtgcatttgtgaaatacctaaccgttcccctgtatctttttgatttaaattttctccaaatatataatgaataacactcttttctgtgtcatttaatacgttgaaaatatcctttaaaacgagacgcctttctgcctcttcatatccttgctctacttcacctacagattcaatcctcgctaccgaactgccatcagatgaattttcaactacatcatctaaggaagatacgcgataattatttttcgcatccataatttctagcacttcctcttcggatagtcctaaatgatctgcaatctctttaatcttcggtgaacgctggaaacgatctgttagctcctctatagcaagtttaatcttcccgcctaaatctttaattcgccttggaacgtgaataccccaagttttatcacgtaaatatttctttatttcgcctactattgtaggtattgcaaacggctcaaaagcattccctatcgaataatcataccttcttattgcgcctaagagccctaacatccctacttgtataatatcctcatgcataggcccgccttttgaatagcgatatgcaatggagtatacaagatttttatagtgattaaccaatctttcctgtgcttcatcacattggttttgttggaagtctgcaattagtttaataacgtcttctttagtaagatttgtaggttgagattggatttccatcattctccacctgctctctttgtatatattttgtcattaaaactgtcatgccctcatcatgcataatttgtatatcatccattaacgtattgattaaatataaacctaaaccattttccggcaaatgttctactggtttactaatatcatacggaccaactttcctttttaagctattaaaatcaaagctaaccccattatccgcagccataatttctaatcgatcttcatatagcccgaagacaattgtaatttctccaacgtcttctttgtatgcatgttgtacaatgtttgtacaagcttcactaatagcaattttcatatcttctatatcgtcataagcaaagcccattcgattcgcaacaccagccattgttaaacgaataatagccacatattctgcttttgcaggaattttcatttctatcttttcaaatctctccatcatccctagtcaccttctttctactttttcaaaatcggaattcaaatttaatatttctgttagccctgtaatatcaaataatctttttagccttttagacacaccagtaaactctagcttcccatcatttttcttaactgcttttaataaagctataaaaactcctaagcctgtactatccatataatctacgttatgaaaatctactacaatatgaacctctttttcgcttgtaataggcattaccttattttttaaatctgatgccgtatacgcatcaatctcaccattaagttgtaccgtataacctacatcattttgcaaaatatttattgccaaattcatcatttccgcccccttatctcgaacttttactatttaattacccataaaaattagttttaaacatatttttttattttcattataaataaattttctacacctttctcggcttaacacttaaatcgtactaataaatgtttaaaacttataattttgtgtatgtataatgtataaacattatttttagggggatctatctatggaagagcacaactttaaaaagggagatttcgttcaattttcttatcgacacgatcatgctacaaaattagttggttccattattaacatactaacgaatacaattgtagttgatataagtaatagcgaggacttatctcatatagaaccaaggcaagtcgtaagaataaataattgtaaaaaggtaacgatggcttaatacataatagaaagtgtaatgttaatgagtggggggttcttcatcctccactcattcctatgtaaaatacataaaaaagcatccaaattagtttaattggatgcttttttatgtatttttatcagttcattaactttataactatatataataaacttaagattactatttattatcatacttacgctttccgcagcattctagagaagaatgtaacgattaaaataaagacgattgcacctaataacgctggaagaacaaaaatgcctccccattcaggaccccaatgaccaaataacgcactacctacccaagatccgattaatccggcaatcacgttaccaactatacctaacggaaagtcttttcctgtaatcattccagctaacgcaccaataagtccacctacaatacacgtaataataagtcccacaattaaacctcctatattcgttttatattgaattcatcaagctttagtatgtaactaaagcttgatgaacatatattattctttattatccaattcatcacttatcttttgtttcacttttccgactttttcttttatcgttcccttcgttttttcccacttaccttcatttttcaactctctatcttctgtaacttcaccaattccttcttttacttgtccttttttcttttcaactttacctttaacttgttcttttagtccgttctcactcatatttacaatctccttttcgtaatagatttatagatttaaaggatacaaatttaaatagaatacatgcatcttctttcttgtaaccattcaccgactctttctaaatccttaacgaataacaagattttcccttcatccagtttttcttcataaaagttcgcttcttcctcattaagccctaactcttgcattttatttcttaactgatctcctgttttttgaaagacgttaataatgcttgtcccaagtccctcctcttttatcccaattgtattcacgtctgcattgtccgcaattctatctgtcctatctttctcatgcgttaatacgtaaatatctttttggtctattccttttttcacgagatcattcgccgcattcatgacctctttctccgtaataaattcatatacaaaaggtttactatacttcgtttccatctttaacttcctcctttaaaatgaattatttgttatattatatgtagtacacccattttcgaaatgttaaacataaaatatgaaaaaagttatgtgaattttaattttaatagagaatgaacatcatcatttaccactttaaaacatcttctccttacaataaccacctaaattaacagaaaattgttataattaagcttgaggagggatactatgaaaaaaatcatatctatatgcgctctaaccgctttatctttcactttaataggttgtacaagtacctcggctacagataaagcttcacaagttaagcaagaacataaacaaaatacctttcaattaaattctgctaatattacagacattgaaatactgaaaacaacaaatcatactacttccaaatctcaaacagacaacgaaaaaatgatacaatctatcgtttcagcagtccaaaaaggcactcctaaacaaatcacactagatcaaaaaaagagagaatctgcacattctactattactgttacatataaagatgactcaaaagaagaatttcttgtgtgggctgataataaggagcaaattacgattgctaaagatgagaagaaagataaggtagaaggtgtgatagtgaatattaaagatgctaaaataatgaaggatttcttttaaaattctaattaacgttaaaaaaagtaggattacatcctactctttttttaatcatgctcaataaatagacctttataaaatctatttaaggtctaatttttctaaatcatgttgtaaaacattgtttccttcttgtgggttaaatacgattgcactaagaccaaaaacattcgtaacaacatctctatctttcggacgaatgattcttacttcataagcaaaaagtgctggaggaagagctgctgaacgaaaagtaacatatcgattaggtggcaatgtttgtgttgaagggtctattaatggtaacaataccggagaaccagatgaccaatcaaacatttcaactgttactctacgagtatcatctggatcaacattcatagcttcaacagtaagaaataacgtagcggaatgtctacgtaatacacccgttgacaaagtttcattgtgatgtttatgacatcttccaggaggatgaccatagccatagctcatatcaattcccccctttcatttacaattaaggacaagtattccttataatatataatgctagtattattttaatgaaaggtataaaagcggatttctatctattcgctcttaaagaataatatggattctcctgtttttcctttgaactcctgctaagaataaatctattttgaaaaggacctgctccatttattcgtaaaaagcataaagtaaatggaatccgttaaaacacatgagtgaacctttgtttttctcctcctatttaaaggaggaactgttatgggctttggtggtagttgtggcggctgtggcttcgctggaggatttgctttattagttgtattgtttattttattaatcatcgttggagctgcttgcttctgctaaaaactatcgaaaggacactcacgtgagtgtcctttcttcatgaaaaaagctctacgcaatgtgcagaggttcaagtgtaacgaatactttaaaaatgtagtattacattccccctccaaaatgaacttcgatgctataaatttcgtttaagtgcaatcttaatattttagtttaatagcaatatggtgaaactttattccaaacaatattgctattgcaccaaagtaaaacaaactggacaacctagatttcaaaaggaagacaccttaaaggttgtcttttctttataagtaaaaaaagcccgcctatttccgtaggcgggctttatctttattacacaatatgaaagtatactctctttttctttgaaattttatgtaattatacatattcatgaaaatagaagaagtgaaattgtacgtttagatacagtttggcaacaaactaactgttttcttgtgcattaatagacaactactgcaagagttatagtttttatgttttcatttcctttttgcatttctcttttaattagacgaatgctttttttagtacataataaaaaatatccagaaaaactgtcacaaaatccgtttttctggtttctctataatacaggtatcaaattgaaagtgaggtttaaacgaacatgttaaccatagaaaatgaagaaagtcatgcttctgatatgacctttgaagatttatttaagcagtactatgcttacgctgtgaaacaaatcatctggattgttaaagatcaatctatcgctgaagagttagcacaagaagtatttttacaattatatcgtagtgattggaaagagattgaaaacatacctggatggttgattaaatcttctacttatgtagcctataaccattttcgatctgaaaaaaggcagcaagcgaagattgataaagaaatacaataccatgaagtacaaaatgtttcatcattagacgatgattggataagaaaagaagaaattacaaaggtccaaacgatactaaataaaatgaatgatcgagaacgaacccttttactaatgaaattctctggttttcaatataaagaaattgcagaagtacttcaaattgaaatatcttctattggaacattattggtccgagccaaaatgaaatttcgcaagatttataaacaaatggaggaggcataacagatgaaatgttatgatatcgggtttattcaaacatatattgatggagaactttctcatgatataagaaaggaattcacaaaacacctagatacatgtgaagcatgccaagatttattaatagaaattagtaaattaaatcaatgggaaaacgtaatgctagatgaagaatctgcaaattcaccacaagaaatcaaaattgatatagaacaagcatggaaaacatttgaaagtcgttccaagttagacaatgtttctaatataaatcacaaaaaacaacaaaagaagggactctttacaaacatgagtaaaaaatcaaaacgttttatttatacagcagtagctgcagcagcacttttcacaacagcaatgattccacaagtacaagtggcggctacaaatgttgcttcctatttttctaatgcaattacaaatgataaagttgtaaatgaaggaataaaagatgaaaatggtatcacacaagatatgatgaagaatggtaaatatattcctattgatgaaaaaattacagatcaaggtattactgtacatctcaaagaagtatttatcgcagattcacgtatatcagttcattatagaatggaaaaagcggacggaagtttagtaccatttgaatttgatacatcaggattaaatcttgagagtgatggtaaaattgatgggcaacaagaggaaaaccctgagattaaaaatgacgggagactatcatttatccatgattcagatgattatcttccttttgaacttatggcagcaggtaaaaagttagataaaataggcattcgtgataatgatagacctgaaggtgttgctacatttgttataactactgaagaaaaagacgtttttaaacagcctcttactttagacgtaaatataactagaattggaaaagtaattggttcttggaaagctcaaattccaattgatacttcacatttgaaaaataatacgaattaacatgaaaaaaagaatagaacaatatgtatctaattctcagtttatatgtttccttgttttcgttacatttatttcgtatatagtttttactctatattttatttatgatttaagtttataaccttaaatcaatcatttaagaccattataagaaaaagccctctaaaaaagtgggggaataaataaccggtttcttaacgtataaggaatcggttattttgtatttaaaatgcgtctaaacgtacaattttctttttttgatatggtgacctccaatacatcattgtccttctctaagctcatatctattttaagaagagtcatttacaaattcaaaaaaaccctcaaagcatctactttaaggggatttctcctatcatcttctctcttcatacaatcgatttgctttatacgagcaaacgaaaaacatacatgtcgcaacggggataaatgtcaaaaaaagtcctctcattaatgcaaatggcgtttcaaataagaatgaccatagaaatgatacaccttgcttatcccataatcctggcgtcaagtatagttctttcggatttacaaaggctcctaaattcattgtattactatacataaataaaaataatatcggcaaataacagatcgctaattctaaaaatgttttagatagacgcttatacttccctgctcgtgacattggatctgaaaaaatgtcatcttcactttcttcatctacctttttaaaatattgcgtacctgaccaccgattaccagctatatgctcccaaccactatcttcaaataatgtgcagtaattaataaaatcactttttctactaaatactctatggtctattttaatcgtcgcatcttccggttctgtatatctaaatgtataaccaaatgtattgctttctagttgatagcctttccaagccatctcttctaaccatttttcctctttctcaaagtctaaaaagaattttaatctccacatcatcgtttcctcctaactatacgtgtaataaactttttgtaaccgcaataatgtgctgcattctcataaaatctaaatgcaatacttctttcccgcgttccgtaatgacatacacttttcttcttttatcttcactttttaccgattctattaacccttgttttaataaattttccaccgcaccatacaatgtacccgctgcgattttcacttgatgattactcagttcctccaccttttgcataattaaatatccatgagctggctctaataaagctaaaagaacgtaatacgttgtttccgttaatggtaaatttttatctctattcataaagacctccaatgtaacgataactatatagctaaactatatagttaaactgtatagtttaattttatacagtcagactgtatatgtcaaatgtaggaataactttataacccaaaacaaaaacgctacctttttaaaagatagcgtttttgttttacccttgcttattcttcgccttcatttgctcttcaagagattttttttcagtttctaacacactcatatcacttttcaacttttgcgtttcttcaaaatgttcatctactaatttattatattctttctcagagtacattttttcactggttgatgtcgttttttctttcgtaacaactacattaataattacaaataaggctacaattcctattaacgcaacgaaaatcttctttttattcatgattaatcctccaaaatgtaaaatttcaaaaattatcataacagaccaattcgctttcacctgtcacattttgtcgaatcaatataataaaaaaaagcatctgaaacagatgctttttctcattcttaatacgtaaacgtaatcgtcactaaagaatacccttctttcgcattgtaaggctccgctttataagaaacacggttgaacccttgcggataaccgatttccccaattgcatttttcacatcttgcagcgcaccgttcattgattgcttataaagtacttctatcttttctggctttgcactataacgctgctgcattttattttttaattcagtatagttatttgcaatatattcatttcctaaatagtttaactttgtatcttttaatatttgctgatatgcagacgttttcgtactacctgccgcaattttatttgtcagtgtactataataatttgttgtagcttgcggatagtctccacggttccactcatgatttcttgcgatttgttcatctgataaattgaaatacgaatacgttacgcggccctgctcatctggcaccggatcatcgaatgttgtatcaaggtgataccaattgttttcgattttcactaaattccaagcatgaggttgtccgtccccagttcctgtcacgaaatgattttcaattcctgcttcttttaataattgataagttaatagtgcgtaaccttggcaaaccgcagaacgatttacaagtgcttcatatgctgtgtaagctttataagacgtatcataagaaacatgctttactacgtaatcatgaatcgccttcactttttcgtgatcatccattccaacttgagtgatagaagaaacgattgctttcgcttgtttcatgacatattccgtctgttctttcgtttcacgatatgtaatcttaagcgtaaacgtataatttccaggtgatccagaaagtccatatgaaacattcgatctattattatttgtatactcattcttacttgccacttctttatatgcgttaaaaagtgtattcatcacttcgtctgtattattatttttcgttttatatggcagtgtaatatttgtctcgtatgtattaatacgcttttgtacttcctctttaaacgctgttaataatgccgcatctcctgtatctttcacatcagcatttttatacttcaaagttttatataaaaactgcgcatactgttcacgtgttactgtgccatacggttcaaaattcccgttccctgtgccatctgcgattccatttgactgcaccgcactaattgcattttctgcccaaaatggatttggaacatccttaaaggtatgtttttgttttgccgcaagatggaaagcattcgtaagaatttgtgccatttctgcacgattcacagaagctttcggtctaaattggccattttcatcacctttaaaaactcctaaatttgttaaagttaatacctcttctgggaacattgtagaactttgattaatatcaccgtaaggatttttaaacgtagacccatcctttaatacgtaacgagttccatcattactaaacgagccgccttgtttatttggtactaacactcgataaattaaagccgcaacttgctcccttgtcgcaacatctccaaaaccaaatatcccatttccataaccggaaataatatttttactcgctaaatctttaatcgcaggatatgaccaatgtgatgtcggcacatcagaaaaaacacccacttcagcagcttttacatcgctgccatttgtatataacaacgcaccaccaataagtgataatgatgtaattgattttaatagttttgtatacataatgtcttctcccaatacgctctctatttttgttggtttatgtcgaaaaatctaaaaatatgacaaaatatattatacaattaaaactttttaagggatatattaaattttaaaatatgcaaaaattcatattgttataaggattcatagtgatattatgttattttacttgcgaatatataaataaaaaaacgctcatctgagcgtttcatctatatacctaataattacttttttctacacttcgaactcttcttcggtaataatcctttgatctaacaactctttatactccaatatttctttagccccacgactctccatgcgtatattgtataacactttttgtattgacctttgattggtccgttgaaagatttactccatttagaaataattctattgaatttttcaccactagccacaaaaacatcttataatctttatataataaactacagtattaggagtagataaaatgccagttacactcgaacttattcttttcattcttatagcaattagtgctgttggctatttaataaaagaatttcaaaaaactaggaaacgaacacttggaatttcactagaatttttagttcttttctggtcaatatggagaatatcaactctcataatctaatttataaaacatgaattccttcgaatgaagtgaaactctaatcagtgggggttttacgggataaatttaccagtattttcaccacaacattcatgttaaaatcccttgtgagtacgacataactcgaccttatgaagctccgcagcttttatcgcggagctttttttatttaaattaacgcttttgttcacttttttgatacatttacgaaacattcatatgttacgttatataagtccttttttaaatcatattcattctagtaaaaagtcctagtccccctaggactttttgcattcaaataatgagttgtcttttttctcaataaccgaaactatttaacatggtaaaataataattggactggcatccaataccatattacaatggagcaaatcgcaagaaggcaccttagagtgtcttttttgtacataaaaaaatcttaccatcttatagaaacgataagccctttaaaacaataattgcaactatattaactttacattacattaaggttagagaatgttcttatattaataaagtgctaaatagtaggtgaaaaaatggaatttaacgatttgggtattaccattaaagaacttagaattaaaaaaaatatatcacaatccgacttatgtcacggaatatgttcacaaagtcaaattagtaagatcgaaaaaggtatgatttatccatctagcatattgttatatcaattatcagaaagactcggtgttgatccaaatagtatatttgcactaactcaaaacaagaaattaaaatatacagaaaacgtaaaatacgtaatgagggattgcataaggcaacatcaatataaagagctttatgaaatagtaacaagagaaaaatacacaaataattttcaaacaaaagaagataaacaatttctaatatggcatgaagcaattgctatatattgtgtgaataactcaacaaaagtggctttaactcttttaaataatgcactaaaactaactgtaaccaatattgattttttatcagagagagaaatagatattctacatacaatggctatacttcatgcagaaaataaagaatacaaaaaaagtattactatccttaaaagatgtttaaataattttaacaaattagattttcctagagataaagaaattaaattgaaaatcatttataatttagcaaaaaatttaagttacacatatcaatacgaagaagcaataaaatacattgataagggtatccaattagctattaatctaaatactttttacttattgggtgaactatactatggaaaaggttcaaatttattaaagcttaaacaatataatgaagaagatgttgctaataacatgagaaaatcattatttatatttgaattaacaaaaaacgaaaaaaaattacaaataattaaagaagaatatttcgaaaacaaaaataaccactcataatttcttaaaaactacttataaaactcacaggaaaaatcccaatagtttttaaacttagaaccatattattgttttaattcagaggaaggcaccttagggtgtctttttttattttcaaaaggacctgctcaattaattcttaaaaacatactaagaaacattgttttatttatcccattttcattcatgctatataaaattcgttaataaatccacctcaaacatatttatatgcattggagtatgtttgaggtggaactccttcaaatactagttccttttataagccgtttttttgatgtagatgacattattctcaatacaatagaatgaattatgggaacatacttagcaatatatatcaaaaaacaatattaagaaaacccctccaccttaaggtagaagggatcttctaatttctatttcaaactacctaaaatttccgtaaagataacccaaagcgtatgtgcacctgcatctggatatcctaaacttttttcaccaactaccgctcctctgccgaatgatctttcaccgatagattgtatgccgtgaagtgctacttgtaacatttcaattcagatatacgacaggaaagaatacatcatcacagtgtcagcaagcaaaagtgtattctgcatttctgaaaacagtagatggcagattgtgacctactgaatctgctaagaaagaatatacaagaacatccttaacatcctctttatttccactaatgatgacatcaaggaaatcttctacttgaaattctggagtaaacaacacaatcttagttgttctgtttggttctaaagaaacaaaagtacgagagatttcaactaattcattttgagttgggaaaaaggtgtttcgacttctcttaacagttaccgttacattactagtatggcagcgtgaatcattgtttaacataatgttgagagcagttggaataatcccattttcagaaactggaactcgaaacactccagtagatttatgagccatataatcagatccttccaaaataaaatatatttacaatatattagatgcaaaaaacgttcattttgatatggacaaattatatgattaatatatctataataaccctcggtattactaagccaatgttttaaaagattaacaaataattacctctgcaaatttagaaaatatctacactttttacaaacattattacaattagataaactaaagcaatatctcattaacaaagggactccataattggagtccctttgttaatgagatattaaaaatgatcagcatgtgaatattgtataatttcttccttttttagagcatgttgtgtatcacctgtattgttactaaatgataatactatcactaatcctaacgtcgctaatataagcttcttcattattttaacgcccctttgcttagtagtttttgtttcgcttcgtaacatacatcgaaataatcactaactttttcatgcttattcaatttgctgcgacaacatcatttgataaaaatcattaagttgttgcataactgcttcatacattaaaatatttgtgctcatatcactacgtcctcctcaactacttctatttacctaaaaattatcataattctgtaaattatataatagttcaacctctaattgtaaatcgataaaaaacaacagaatattccgaatcaagagaagggattggctaacaaatggttactgtataaaaataaaaaacttgtgatattgcttttatcatatttgctcttatatatggttctgttacaaagtttgctaagttaatataaactctagaaaaaatgaataaagatcaccacagctgagctatctttaatccgtataataatataaacattctattaattcatattattaataaggaaatacttaaatattcgatttttttctaaaagtgtattatactgtaaattgctgagggatacattttagtattttctggtaaatattcagtttgttaggttgttattagtattatggtaacgaaaaacttatattttcccttgaagataaagcattagcagcaattacatccagatatcataataataattattttcttaacaatatcacggaattttaattcagaaaattcgaacccttaagtaatataaagtgctaaataaaatatttagacaattgaagtccaacaacgattagaagatatatatattagaaaaggaattttgggagagcttatcctatataactaatacatatagcgttgtatctttaaatcaataaatttttcgataagctagttaatagattattgaatttaatcttttaatagagttaaaaaaatcaactttacattctaatttagaaattattaggtggtgtcggtagtgtttgagtatcttttagttaaagctttatttactattttcttaattagcctaatcgtgttaatcagtttaatatggactaaaatagaaaaaattctggacgagactgtatttaaaaacgtttctgaaaaatccagatatgtagtaactatggtaattgttatggtaggagaatttgttctcatagtcattacttcattaaattggagagcttcaattattgacacactcttttttggtagtattattttattctgctgtatatggctaataccttattttgttaatcaacaacaaaacgtcgctaaagttatggataagcattttagtggaggggtagatttaggtgaaattcaagttcatcgtgcgaaactttctgcatttaatttaggaagtattgtattttctatagtgggaattattatacctatttgttattattttaaatactttttataacggtttattggttctgttggaaattttttaaagatatagtaataggtgagattacagatatttatgtagaaacaacttagatgtataagacaatccatgtgagcgaaaacagtaaaataccctataaggtctcttttacttgtattaattaaaaaatgatactaattataaatgctaacttaaatatgtacattaacgcttgaataaatatgtacattttcgtgtggagtgggggaaaaggtagagataacttcaaatccttacctatcactaacaagagcgtcgaggtgtatttgaagaagcggcaggcgtactaaaatacaaacttcgcaaaaagaaagctgaagggaaactagcagaaacacaagaaaacttaaatcgtgtacaagatataattcatgaattaagtagtcaagtagaacctttagaaagacaagcttctattgcgaaagattatcttgagaataaagaagaattagagaaagtagaagctgcgcttattgttcatgaaattgaagaattgcatgagaaatgggaagcgcttcgaaatcagtttgggcataataaaaacgaagaagctaaaatgtcaacgaatttacaaaaaagtgaagaagagcttgaggaattacgaggacaattacaagcggtagacgagtctgtagactcgttgcaagaagtacttcttctttctagtaaagagctagaaaaactagaagggcagcgtgagttgttaaaagaaagaaagcaaaatgctacgacgcattgtgcgcaacttgagcagttaattgttgaattaactgagaaagctaaaagttacgatggtgagattgagtcaagtacagaatctttaatgcaatttgtgaatgaagtaaaagagttggagcaaaaattgcatgataatgagcaactgcttgctacttttgctgacaatttagaggaacagattgagaatttaaaaggtgactatattgagcttttaaatcaacaagctagtcatcgtaatgaattatctatgattgaagaacaatcgaaacagcaaacgtctaaaaacgagcgtctagatgaagagaatgcgaaatatgtagaaatgcgtatggaaattacagcgaaaaagacgaaacttgtagaaagttacgaacaagcgaaagaaaaagtagctggcattctctcaaatatacagaagacagaggcggcgcttgggaaatgtaagacgcagtatagtgaaaatgaaacaaaactgtatcaagcatatcaatttgtgcaacaggcacgttctcgaaaagaaatgcttgaagagatgcaagaagattattctggattctatcaaggtgtacgtgaagtattgaaagctagagaaaataggttgcaaggtatcgagggtgctgttgcggaactgttaacggtaccgaaagaatacgaagttgcaatggaaatcgctctaggtgcagcgatgcagcatattgttgtacaaacagaggaacatgctcgtaatgcgattgcatttctaaagcaaaataaacatggacgtgcaacgtttttaccgcaagctgttattaaaagcagatcgttatcatttgagcaattacgcattgcaaatcaacacccatcgtttgtaggtgtggcggcagaacttgtgcagtacaacaataaatatgaaaatgtagtttcaaatttattaggtactgttattgttgcgaaagatttacgtggagcaaatgagttggcgaaacaactgcaataccgttatcgcattgtaacaatcgaaggcgacgtagtgaatcctggcggttctatgactggtggggcggtaaagcaagcgaaatcttctttattaggacgccaacgtgaactggaagagtggactcgcaagttaactgatatggaagaaaaaacaacgaagttagaaaactttgttaaagcagtaaaacaagagattcaagaaaaagaagtgaaaatacgcgaactaaggcaaactgtagaagcagatcgtgtagatgagcagaaattaagagaagagattaatcgtttagaattagaagaacatcgtattaatgatcggttgtctatttatgatttagagattgaagggtttttacaagatcgagtaaaaatgcaagggcgtaaagaggagttagaaggggttttaacgaatcttcaagctgaaatcactaagttagatagtaaaattgtagctttaacaaaacaaaaaagtgagcaacattcttcgaaagaaaaagttcaaaaagaaatgactgagttaaaagtgctggcagctgaaaagcaacaacgcttatctaatcaaaaagaaaaagttgaacgattgacgaaggaaaaagaagaaacggatgcgacacttgtaaaaacgaaagaggatttagcgttcttaaaacaagaaatgacatctaattcaagtggtgaagagcaaattacgaatatgattgagaagaaagcatatgatcgtaatcaaacttcagaattaattcgctctcgtcgtgaacaacgtgtatcgttgcaagagagagtagaacatttagagcgcaatttgaaagaaacgacaggtaaacataaatatgttcttgaaatgttgaaagatcaagaagtgagaataaatcgactggatgtagagttggaaaatagattacaacatttacgtgaaacatatacgatttcatttgaagcggcaaaactaaaatatacaatgacaatgcctgcagaagatgcgcgtaagaaagtaaaattaatcaaattatccatagaagagttaggtacagtgaacctaggggcaattgatgaatatgaacgtgtagcggagcgtcatacattcttactagagcagagagacgacttagaagaagcgaaagcgacattgcaccagcttattaccgaaatggatgaagaaatgaaaaaacgcttttctactacgtttgaaggcattagaatggagtttcaatcggtattctctgaattatttggaggcggtagagcggatttagtaatgactaatccagaggatttactaaatacgggtattgatattgtagcacaaccgccagggaagaaactgcagaacttaggtttactttcaggtggagagcgtgctttaacagcaattgcgcttttatttggtattttaaaagtacgcccagtaccgttctgtgtactagatgaggtagaggcagcccttgatgaggcgaatgtagctcgttttgcacagtatttaaagaaattcagtgatgagacgcagtttattgtaattacacatagaaaaggtacaatggaagagtctgatgtgttgtacggtgtaacaatgcaagaatcgggggtatctaaacttgtttcggttcgtttagacgccggagaagaacttattgcaagtgaataggaaggatgggaaagtatgagtttttttaaaaaactaaaagaaaaaatttcaaaacaaacggatacagttacagagaaatttaaacaaggattagaaaaaacgagaaattcatttgcggataaagtgaatgatttagtgtatcgttaccgtaaagtggacgaagatttcttcgaagagttagaagaaattttaatcggtgcagacgttggcgttgcgacggtaatggaattaattgaccaattgaaagaagaagtacaacgtcgtaacattcaagatccaaaagaagtacaagctgttatttcagaaaaactagtaggaatttacaaaggtgacagcgattttagtaacgaaattaatatgcaagaggaccaattaacggtcgttttatttgttggtgttaatggtgtaggaaaaacgacgacaattggtaaactggcgcataagtttaaatcagaaggtaagtcagtcctattggcggcaggagacacattccgtgctggagcgattgaacaattagaagtatggggcgatcgcgttggtgtagaagtgattaaacaaggatctggatctgatccagcggcggttatgtatgacgctgtacaagcagcgaaagcacgtaaggtagatgtattactatgtgacacagcaggacgcttgcaaaataaagtgaacttaatgaaagagttagagaaggtgaagcgtgtaattgagcgtgaagtaccaggtgctcctcatgaagtattgcttgttattgatgcaacaacaggacaaaacggtttaagccaagcgaaaacattccgtgaagcaacgaatgtaactggtattgttttaacgaagttagatggaactgctaaaggtggtattgtattagcgattcgtaacgaaatggatgtaccggtgaagtttgttggattaggagagcaaatggatgacttgcagcagtttgatccagaacaatatgtgtatggtttatttgcgaacttagtagaaacagaagaagtataagcgaaagaagcggtatttccgcttctttttctataaaaaatatatgatgttaagaaaaaaacttgacactcttttggactacatgtaaactaattcatgtaaagggaaatcacttaacaaaggatgatccaacatgctcgaaaaaacaacgagaatgaactatttatttgatttttatcaatcgttgttaacgcaaaaacaaagaagttatatgtcgctttattatctagatgatttatctcttggtgaaattgcggaagaatttgatgtaagtcgccaagccgtgtatgataacattaaacggactgaagcgatgcttgaagaatatgaagaaaaattagtattacttcaaaagtttcaagagcgacagcgacttgttgcaaagctaaaacagctaatcagcgaagaagagcatgtgaatgaagaaatgaaacaagttgttgaagctatcgaaaaattagattaggagggcggcaatatggcatttgaaggattagccgaccgacttcaacagacaatgcaaaaaatccgcggcaaaggaaaagtttctgaagccgatgtgaaagaaatgatgagagaagttcgtctagctcttttagaagcggatgttaactttaaagtagtaaaagattttgtgaagcgtgtgtctgaacgtgctgtcggacaagatgtaatgaaaagtttgacacctggacaacaagtaattaaagttgtacaggaagaacttacagaacttatgggcggagagcaaagcaaaattgctgttgctaataagccaccgactgttattatgatggttggtctgcaaggtgcgggtaaaacaacgacgacaggtaagcttgcgaatttgcttcgtaaaaagcataatcgtaaaccgatgcttgttgcagcggatatttaccgtccagcagcgattaaacagcttgaaacattagggaagcaattggacatgcctgtattttctttaggagatcaagtaagtcctgttgaaattgcgaaacaagcgattgcaaaagcaaaagaagatcatcacgattatgttttaatcgatacagcgggtcgcctgcatattgatgaagaattaatggatgaattagcgaaagtgaaagaagttgcgaaaccggatgaaattttccttgttgtcgatgcgatgacggggcaagacgcggtaaatgttgcacaaagtttccatgaacagttaggtttaacaggtgttgtattaacgaaattagatggtgatacgcgcggtggtgctgcattatctattaaggctgtaacaaacacgccgattaaatttgctggtatgggtgaaaaactagatgcaattgaagcgttccatccagagcgtatggcatcccgtattttagggatgggcgatgtcttaacgttaattgaaaaagcgcaagctacagttgatgaagagaaagcaaaagaacttgagcaaaaaatgcgtacgctttcgtttacgcttgacgatttcctagaacaacttggacaagtgcgccaacttgggccgcttgatgaattgttaggaatgcttcctggtgcaaataaaattaaagggctgaaaaatgcgcaagttgatgaaaaacaaattgggcatattgaggcaattattcgttctatgactaaattagaacgagaacaaccggaaataatcaatgctagtcgcaaaaagcgcattgccaaaggtagcggtacaactgtacaagaaatcaatcgtctaattaagcaattcgatgacatgaaaaaaatgatgaagacgatgacgggaatgcaaaaaggtaagaaaaaaggactaggtggattgaagtttccattcatgtaaggaaaaaaagatggctctgttaagaaaaaatactttacaaagcaatagtctttttgctaatataattatctgtgtgaaataaattcggaggtgctttataaatggcagttaaaattcgtttaaaacgtatgggagctaaaaaaactcctttctatcgtgtagttgttgcagattctcgttctcctcgtgacggacgtttcattgaggaaatcggaacttacaatccagttgctcaaccagctgaagttaagatcaacgaagaagcagcattaaaatggttaggaaatggtgctaaaccatctgatacagttcgtaacttattctctaaccaaggtatcatggagaaattccacttatctaaacaaggtaagtaattgaggcaatgactatgaagaagttagtcgagacgattgtcaagcctcttgtcgattatcctgaagatgtaaaagttacacaggaactttgcaacggagagataaagtatcgattaactgtacatcctgaggatgttggaaaagtcattggaaagcaagggagagttgcgaaagcgattcgaatgctcttgtattcagtgggacatcataatgatgaaaaagtaacactggaaattcaataaacgtaaaaagggcgaggagttattcctctcccttttttaacatttaaatagagattgcatgttccatctgcgaaatggagatgcttaatttatatagaaaccaggggtgacatactatttatgacaaaatggtttaacgtagggaaaattgtaaatactcatggcgtaagaggagaaatccgtgttatttctcgtactgattttccagaagagcgatataaagtaggaaacacgctatacatatcgaatgagaaaggcacagactatcttccggtgaaggtaacttctcatcgccaacataagacattcgatttattaacatttgaaggatataacaatgtagatgaagtagagaagtttaaaggttctttaataaaagtaccagaagagcagttaggcgaacttgctgaaggtgaatactactatcatgaaattattggttgcagtgttgtaacggaagaaggagaagcgctagggacaatcaaagagattctatctcctggtgcaaatgatgtttgggtaattaaacgcccgaagggtcaagatctcttaattccttatatcgatgatgttgtacttcaagttaatattgaaaataaattagtaaccattcatgtaatggaagggctgctataatgaaaattgatattttaacgttgttcccagacatgtttaccggtgtatttggatcttctatattaaagaaggcgcaagaaaaagaagcggtaaaccttcgtgttgttaactttcgtgattatacaacaagtaagcataatagcgtagacgattatccttacggcggaggagctggtatggtgcttactcctcagcctatttttgatgctgtagaggatttgacgaaagagacagagcgtaagccgagagttgtcttaatgtgtccgcagggcgaaagatttacgcagaagaaagcggaagagcttgcaggggaagaacatttaatcttcgtatgtgggcattatgaaggatatgacgaacgaattcgtgagcatctcgtaacggatgagatttctattggtgactatgtattaacgggcggagaattagcctctatggttattactgatagtgtggtacgtctcttgccaggtgtgctaggaaatcatgcttcacaagtagaggattcgtttagtacaggtttattagagcatcctcattatacacgtccagctgattttcgtggtatgaaggtaccggatgtattaatgtcagggaatcataaaaacattgatgaatggcgacataaggaatctttgcgccgaacgtatacgcgtagacctgatttattagatgagagagagctatctaaacaagagaaaaaatggcttgaggaaataaagcgagagcagtaataacttcatatatttgctattgcaacaggcctagtaatatgctattataacatttgtgctactgaaatcagtagccgtattaacgatgttccgctgtaatttattaagactttataagagcatctgtttaaaggagagaatttaatatgcaacaattaatcgcagaaattacaaaaggccaattaaaaactgaccttccttcattccgtcctggtgacactttacgtgtacacgtaaaagttgttgagggaactcgtgaaagaattcagcttttcgaaggtgttgtaattaaacgtcgtggtggcggaatcagtgaaacattcacagttcgtaagatttcttacggtgtaggtgttgagcgtacattcccagttcacacgccaagaatcgcgaaaatcgaagtacttcgccgtggtaaagtacgtcgtgctaagttatactacttacgtaaccttcgcggtaaaaaagcacgtattaaagaaattcgataagacatgtatgggagcttgtaaatgcacaagctccctttttccaatctatatgaaattttggtataatacgagcagtttacataaccgtggaggggaaatgcatgaaaaaagagaagagttcactttgggaatggattaaagcaattttgattgctgttgtattagctggtgttattagacagtttttctttgcgccaattctcgtagacggggtatcgatggcacctactttacatgatcgtgatcgaatgattgtgaataaaattggttatcacattggagatccaaaacgctttgatattatcgtatttcgagcaacagaagataaagattacattaagcgcattataggcctgccaggcgatgaaatagagtatcgtaatgataaactgtatattaacggaaaggcttatgaggagccgtatttagacaagcagaaaaagcaaattgctgacggaccgcttacatatgattttaatcttgaagaaatgacaggcaagaaaaccgttccaaaagatcaattatttgttttaggtgataatcgtcgttttagtaaagatagccgttcaatcggtacgatttcaatggatcaagtaattggtaaagctaatatgttatattggccgttagaagacgcacgtattgtgaaataaatgaaaaagaaggtggcaacatggtaattcaatggtttccagggcatatggcgaaggctagacgccaagtaacggagaaattaaaattaattgatgttgtaattgaacttgtagatgctcgattaccattatcatctcgaaacccaatgattgatgaaatcattacacataagccaaggcttgttgttttaaataaagcggatatggcagatgatcgtttaacaaaacaatggatcgcatattttaaagaaaaaggccatatggcaatttcaattaacgcgcaagctggacaaggtatgaaggaaattgcagcagcttgtaaagtgcttgttaaagaaaaatttgataaaatggttgcaaaaggtattagaccgagagcgattcgtgcattaattgtaggtataccaaatgttggtaaatctacattgattaataaattggcaaagaaaaatattgctaaaacaggagatcgtccaggtgtgacaacagctcaacaatggattaaagttgggaaggaaatggaattgttagatacaccaggtattctgtggcctaaatttgaagatcaattagtgggtcttcgcttagcgacaacgggtgcaattaaagattcaattttaaatttacaagatgtagctgtttacgcattacgttttatggagaaacattatccagaacgcttgaaagaacgctataatttaaatgagattccagaagatattgtggaattattcgatgcaattggaaaaaatagaggctgcttaatgggcggcggaatgattgattatgataagacatctgagcttgtgcttcgggagcttcgtggtggcaaacttggaaaaatgacgtttgaaacaccggaagagtttgcagagcaagtagaagatgtggaaaaaatagaagaagtataagacgtgcgtttgtgcgtcttttctttttggatatgtttaaaaaggagcttgtataaatgcaaactataacgataaaagaagcagaaaatgtattgaaagaaattatgaatgaagaagatgatcgctttcaactgttaatgaaagatgatcgaaaaggtgttcaaaagctcgttttgaagtggtataaacaaaaagagttagaacagaaagaaaaagagaagttttttgagatgtccaagtatgaaaatgctttgcgtgaaaaaggggtcacatatatcgcgggtattgatgaagtagggcgtgggccattggctgggcctgttgtgacggcagctgtcgttcttcctgaggatttttatattccagggttaaatgattcgaaaaaattgagtgaagcgaaacgtgagcgtttttatgatgaaataaaagtacaagcaattgcaattggagtaggaattgtatcgccgcaagttattgatgacattaatatttaccaagcaacgaaacaagcgatgttagatgcagttgcgaatttatcttgtacaccccaacatttattaattgatgcgatgaaacttcctacaccaattccgcaaacatcaattattaaaggtgatgcgaaaagtgtttcgatttcagccgcatccattatcgcaaaagtaacgagagatcgtatgatgaaagaactgggagagaagtatcctcaatatggatttgagcaacatatgggatatggcacaaagcaacatttagaggcaattcaagtgcatggagtattagatgaacaccgaaagtcattcgcgccaattaaagatatgattcaaaaataagttgtaaatatacagcttatttttttattttggcatataaacattactatttccgaaaaagaataaagcgatttcagttttctgacactttattgtagacagcgtgccaatcatcttatacaatggcaatgtaatgttttttaaacattaaaaaacttttcgagtaaaacaggaaaacaggggaggatgggaccatgaatatccatgagtaccaaggtaaggcagtccttagaagctatggggttagcgttccgaacgggaaggttgcatttacagtagaagaagctgtagaagcggcgaaagaattaggaacagatgtatgtgtagtgaaagcacaaattcacgctggtggacgcggcaaagctggcggagtaaaagttgcaaaaaatttagatgaagttcgtacatatgcagaaagcattttaggaactacacttgtgacacatcaaacaggtcctgaaggtaaggaagtaaaacgcttacttatcgaagaaggttgcgatattaaaaaagaatattatgtaggtctagttttagatcgtgcaacttctcaagttgttttaatggcgtctgaagaaggcggaacagaaattgaagaagtagcagaaaaaacacctgaaaaaatctttaaagaatatattgatccagcagtaggcttacaaggtttccaagcgcgccgaatcgcatttaacatcaatattccaaaagagcttgtaggacaagctgtgaagtttatgatgggcttataccgtgcgtttatcgaaaaagattgctctattgctgagattaacccacttgttacaacaggtgaaggtaaagttatggcattagatgcaaaattaaactttgattctaatgcattatatcgccataaagacattttagagcttcgtgatcttgatgaagaggattcaaaagaaattgaagcttcaaaatacgacttaaactacattcctttagatggaaatatcggttgtatggttaatggtgcaggtttagcgatggctacaatggatatcattaaacattaccacggtgacccagctaacttcttagatgttggtggcggtgcaactgcagaaaaagttacagaagcattcaaaattatcctttctgacaaaaatgtaaaaggtatctttgttaacatttttggtggcattatgaagtgtgatgttattgcagaaggtgttattgaagcaacgaaacaagtaggtcttgagttacctttagttgtacgtcttgaaggtacaaacgtagaactaggtaagaaaattttaaatgagtctggcttaaatattgttgcagcagaatctatggcagacggtgcacaaaaaattgtttcactagtgggctaatagaaagcgggggagaaaaatgagcgtattagttaataaagatacaaaagttattgttcaaggtattacaggttctcaaggtttattccatacaaaacaaatgattgaatacggtacgaaaattgtcggtggtgtaacaccaggtaagggcggcactgatattgaaggtgtaccagtatttgatacagtagaagatgcagtgaaagcaacaggcgcaaacgcttcagttgtatacgttccacccgcttttgcggcagatgcaattatggaagctgttgatgcagaaattgatttagtagtatgtattactgaagggattcctgtattagatatggtaaacgtaaagagatatatggcgggtaaacatacacgtttacttggaccaaactgcccaggtgtaatcacaccggatgaatgtaagattggtattatgccaggatatattcataaaaaaggtcatgttggtatcgtatctcgctctggtacattaacgtatgaagctgtacatcagttaacacaagaaggtattggccaatctactgctgtaggtatcggcggagaccctgttaacggtacagactttattgatgctttaaaagcatttaatgaagatgaagaaacacatgctgtaattatgattggtgaaatcggcggtacagcagaagaagaggcagctgaatgggtaaaagctaatatgacaaaacctgttgtaggcttcattggtggtcaaacagcgcctgctggcaaacgtatgggccatgctggtgcaatcatttctggcggtaaaggaactgctgctgaaaagattaaaacaatggaagcttgtggcattaaagtagctgaaactccagcagttatgggagaaacgctaatctctgttttaaaagaaaaaggtttatttgagacttgtaaaaactattaatctgttgaaagacaccttcttacttgagggtgtctttttagactttttctgtttacataataaaaattatgggtaaggagaatcaagatgaaaagagagagattattacatcttcattacttgctagcagattattggaaagcgatggagaggctactatatgtcgatccagaattagagaacatatataattttaacgaaaaacaaatggaacactacactggaatatcctcgaaaaaatcttcagaactagtaaaatttcttcaaagttcaaatcttccgcaatatatatcttatttagagaaaaatcgtattttttatataacgatatgggatgaaaattatccgcaattattacgtgaaatacaagaccctcccttcgttttatatggaaaaggagagaaagatttcctgaataaagtaaataaattagcagttgttggaacgagagaaccatcattatatggtcatgagagtttgaagtttattttacaccctttattagaaagagagtggcttattgtcagtgggtttgcaaaagggatagatacaatgtctcatgagattacagtaagacatcattgcccgactattgcgatattagggcatggattgtcttttatgtatccgaaagaaaatagacctttatatgaaatgtggaaggaatatatattgttattgacagagtatccgccgcactatgcaccgaaaaaatggtattttccaaaaagaaaccggattattagtggtataagtaaaggtgttttagttgtagaagcgaaatcgagaagtggaacacttattactgcggaccttgcgttagagcaaagtagagaggtatttgcgcttcctggacctatatttatagagggggcatcgggaacgaatcatcttattcagcaaggagcaaaactagtaagaaatgcagaagatatcttggaagagattttaaattaaccttatatttttatgtttttattaaacaattattgacaaatggtagattggcactgtatggtatattcattcttgattgacaaaaacaagagaaatcaataagattaatgaagacttgaatccacctcttaaggaggcactagcatgtcagattacctcgtaatcgtggagtcgccttctaaggcgaagaccattgagaaatatttagggaaaaaatacaaagttgtcgcgtctatgggacatgttcgcgatttgccaaaaagtcaaatggggatagaagtaaagaacaacttcaccccgaagtatattaccattcgtggtaaaggtcccgtcttaaaagatttaaaatcagcggccaaaaaagcaaagaaagtctatctcgcggccgatccagaccgtgaaggggaagcgattgcttggcatttagcgaatacgttaaatgtggacgttgaatcagattgtcgggttgtgtttaatgagattacgaaagatgcgatcaaagaatcatttaaacatcctcgtgcaattaatatggatttagtggatgcacaacaagcaagacgtatacttgatcgtcttgttggttacaatattagtcctttattatggaagaaagtaaaaaaaggattaagtgcaggacgtgtacaatctgtagcagttcgtttaatcatcgagcgtgaaagggaaattcaaaactttgaacctgaagaattctggacaattaaaacagaatttgtaaaaggaaaagacacatttgaagcaagcttttacggtgtagatggtgaaaaagttcaattaacaaatgaaacgcaagtgaatgaaataattgaacagatgaaagacaatgcgttttcagttgaaaatgtaacgcgcaaagagcgaaaacgtaaccctgcattaccgtttacaacatcttccttgcaacaagaagcagcccgtaagttaaacatgcgagcaaagaaaacaatgatgcttgcacagcaattgtatgaagggatagatcttggaaaacaaggaactgtaggtcttattacgtatatgagaactgattcaacacgtatctcagaaacagctcaaacagaggctcgtacttacatcactgaagcgtatggtacggaatacataggaacagaaaagaagaaagaaacgaaaaagtcaaatgcacaagatgcgcatgaggcaattcgtcctacttcggtaatgagaaagccagaggaactaaaaagtttcttaggtcgtgatcaacttcgattatataaattgatttgggagcgatttgttgcaagtcaaatggcgtctgctataatggatactgtgacagcgagactcattaataacaatgttcagttccgtgcaagtggatcggttgtaaagttcccgggatttatgaaagtgtatgtagagtcaaaagatgatggtgctgaagaaaaggataagatgttgccgcctttagaagtaggggaaactgtattttcaaaggatttagaaccaaagcaacattttacacaacctcctccgcgctatacagaggctcgcctagtaagaacacttgaagaacttggaattggaagaccgtcgacatatgtacctacacttgaaacgattcaaaagcgtgggtatgtaggcttggataataaacgcttcgttccgactgaacttggtgaaatagtaattgaacttattttagagtttttcccagaaattattaacattgaatttactgccaatatggagcaaagccttgatgaagtagaagaaggaaatgcgaattgggtaaaaattgttgatgatttctacgtaggttttgaaccgcgtttagaaaaagcggaaaaagaaatgcgtgaagtggaaattaaagatgaaccagctggggaagattgtgaattatgtaatcacccaatggtctttaaaatgggtaaatacgggaaatttatggcttgctcgaatttcccagattgtcgtaatacaaagccgattgtgaaagaaatcggtgttacttgtccaaagtgtgataagggtcaaattattgaacgccgtagtaataaaaagaaacgtcttttctatgggtgcggtacgtatccggaatgcgactttgtatcttgggataagccaattggtcgtaagtgtccgaagtgcgaaggcatgcttgtagagaaaaagttgaaaaaaggcgtgcaagtacaatgtatttcgtgcgattatgaagaagaacaacaaatgtgagcgtaactgctcacatttttttcgggaagaaaaggaaaggtgatataaatgacaacacaagtagtaaacgtcattggcgcaggtcttgcaggaagtgaagcagcttatcaaattgcaaaacgtggtgtccaagttagattatatgaaatgagaccggtaaggcaaacgccagctcatcacacagataaattcgctgaattagtatgtagtaactcacttcgtgcaaacactttaacaaatgcagttggagttattaaagaggaaatgcgcttaatggattctgtaattattcgtgcggcggatgagtgctctgtaccagctggaggcgctttagctgtagaccgtcatgagttcgcagctaaagtaacagaatacgtaaagaaccatccaaatgtaactgtaatgaatgaagaaattacagatattccagagggaccgacaattattgctacaggtccattaacatctcctgatctttctgcaaaattgaaagaattaacaggagaagattatttctacttctatgatgctgcagccccaatcgtagaaaaagacagcattgacatgaataaagtatatttaaaatcgcgttatgacaaaggtgaagctgcatatttaaattgcccaatgacagaagaagagtttgatcgtttttatgaggctctaattgctgctgagacagtgcctttaaaagagtttgaaaaagaaattttctttgaaggttgtatgccagtagaggttatggcaagtagagggagacagacgttagtatttggacctatgaaacctgttggattggaagatccaaaaacagggaaaacgccatatgctgttgttcagttacgtcaagatgatgcagcgggaactttatacaatatcgtaggtttccaaacacatttaaagtggggaccgcaaaaagaagtgttacagttaattccaggattagaaaatgcagagattgtacgttatggtgtaatgcatcgtaatacgtttattaattcacctaatttgcttcgtccaacatatcaatataaacaacgggatgatttattcttcgctggtcaaatgactggagtagagggatatgttgaatcggcagcatcaggattattagcaggaattaatgctgcgcgtcttgtgcaaggtgaagagccagttgtattaccgccagtaactgcgatgggtagcatggcaaattacattacggcaacgaacgctaaaaacttccaaccgatgaatgcgaacttcggtctatttgcaccgttagagaagaagattaaaaagaaagcagaacgaaatgaagcgtacgcagcacgagctttagaaacgattcgaaattttgtaaatatttagttaaatttcttgcaaaggctactaagttgtgatacgatttagtagcctttattgaggtgagttgtgtgaatgtgaagaaattgttacaattattcgttggatatttacaaattgaaagaaattattcaaaatatacaattgcaagttatcaaaatgatttagaacattttgtgcaatttatggaacgagaaggcatatcctcttttttagacgttacatacgcggatgttcgtttgtacttaacgacgttgcacgatgagaagttagcccgtaaatctgtcgcaagaaaagtatcaagcttacgaagtttatatcgttttttgatgcgtgaaggttatcgaaaggataatccgtttgcacttgcgtcactccccaaaaaagaattgtcaatcccaaagtttttatatgctgaagagttagaggaattatttgaagtttctgacacagaaacaccattaggtcaaaggaatcaagctttgttagagttgatgtatgcgactgggatccgtgtgagtgaatgtgtcaatttacaacttaccgatattgactttgcggtgggaacaattttagtaatgggaaaaggaaaaaaacaaaggtatattccgttcggaagctatgcgcaagattctttaattacttatatagagaatgggagaaaacagttagttaataagactgacgaagactctcatatggtatttttaaatgcgaaaggtaaaccgctaacaagtcgtggagttcgttatgttttaaatgaactcattaaaaaggcttcgctgacaatgcggataagtccccatatgttaaggcatacatttgctacacatatgctagatgaaggggcggatttacgtactgtacaggagttattaggccatgaaaatttgtcgacgacacaaatttatacgcatgtctctaaagaaagattgcgttctgtttacatgaagcatcacccgcgggcataaattgctttaaaagctataaaaacaaataaaggagttttttctatgggaaatttccacgctacaacgatatttgcagttcatcataatggagaatgtgcaatggctggagatggccaagtgacaatgggaaatgctgttgtaatgaaacatacagctcgtaaagttcgtaaacttttccaaggtaaagttttggctggtttcgcaggatcagttgctgacgcatttactctttttgaaatgtttgaagggaaattagaagagtataatggcaacttgcagcgtgctgctgttgaaatggccaaacaatggcgtggcgataaaatgttacgtcagctagaagcaatgctcattgtcatggataaaacaactatgctccttgtttcaggtacaggagaagtaattgaaccggatgatggtattttagcaattggatctggtgggaattatgcactttctgcaggtcgtgctttaaagcaatatgcaagtgaacacttaacagcgaagcaaattgcgaaagcgagtttagagattgctggcgatatttgtgtttatacgaatcacaacataattgttgaagaattgtagaatcgtaagggaggcattttatatgcatttacattttactccgcgccaaattgtggaaaaattagatcaatacatcatcggtcaaaaagacgcaaagaaagcggttgctgtagcgttgagaaatcgatatcgtcgcagtaaattagctgaaaatttacgtgacgaaattgcacctaaaaatatcttaatgattggaccgacaggtgttgggaaaacagaggtagcacgacgaatggcgaaactcgttggagcaccttttattaaggttgaggctacaaaattcacagaagttggatatgtgggtagagatgtagagtcgatggtacgtgacctagtggaaacatcggttcgtatcgtaaaagaagaaatggtagtgaaagttcaagataaagccgaagagcaagcgaatcaacgtcttgttgaaattttagtgccgagtccagagaaacaatctggattcaaaaatccattagagatgctttttggaggcactcaaaattcgaatcaaacgtctgatacacaagaagatgttgaaatcgaaaagaagcgtcaagatgtggagagaaagcttgctgcagggcttcttgaagacgaaattgtatcgattgaagtgactgaacaacagtcttccatgtttgatatgttacaaggaactggcatggagcaaatgggaatgaatttccaagatgcgctaggaagttttatgccgaaaaaaacgaaaaaacgtaaactttctgtaaaagaagcaagaaaactcttgacaaatgaagaggcacagcgcttaattgatatggatgaagttacacaagaggctgtttatcgtgctgaacagctcgggattatttttatcgatgaaattgacaaaattgctggtaagcagtcgaatagcgtagatgtatcacgtgaaggtgtgcaacgtgacattttgccgattgtagaagggtcgaatgttgcgacaaaatacggatcagtaaaaacggattatattttattcgttgcagctggagcgttccatatgtctaaaccgtcggatttaattccggaattgcaagggagatttccgattcgagtagaattaacaaaattatcgacagacgattttgttaaaatactaatcgagcctgacaatgcgttaattaaacaatatatggcattattagcgactgaaggtatagaaattgaattttcagacgaagctattcgtaagattgctgagattgcttatcaagttaatcaggatacagataatattggagcaagaagacttcatacgattatggagaagctccttgaagatttatcgtttgaagcatctgaaattacgttagagaaaataacgataacacctcaatacgttgaggagaaattagcaacaattgctaaaaataaagatgtgagccagtttattttgtaatagtgtcatcaggtgactcgccctagtttccaagtgatgaaaaaatatgtgagtaacatgtaggaggaacttttgaaatggaattattagcaaaaacgagaaaattaaatgcgttattacagagcgcagcagggaagcctgtaaactttagagaaatgtctgacacaatgtgtgaagtaatcgaagcaaacgtattcgtagttagccgtcgtggtaaattactaggttatgcaattcaccaacaaatcgaaaacgaacgcatgaagcaaatgcttgcagaacgtcaattcccagaagaatatacacaaagcttattcaacattacagaaacatcttcaaacttagatgtgaacagtgcttacacagcattcccagtagaaaacagagaattatttggtcaaggtttaactacaatcgtaccaatcgttggtggcggtgagcgtctaggtacattagtattagctcgtcttggtcaagagttcttagatgatgatttaatccttgctgagtacagctcaactgttgtaggtatggaaattttacgtgaaaaagcagaagaaatcgaagaggaagcacgtagtaaagctgttgttcaaatggcgatcagctcattatcttacagtgagttagaagcgattgagcacatcttcgaagaattaaatggaacagaaggtttacttgttgcaagtaaaattgctgatcgcgtaggaattactcgttctgtaatcgtaaatgcactacgtaaattagaaagtgctggtgttattgagtctcgttctttaggtatgaaaggaacatacattaaagtgctaaacgacaagtttctacaggaacttgctaaattaaaaacaaactaatttgtaaaaaactctcctcgattgaggagagttttttatgtgcaatggatagatggtgcttgtgaaaagtgtcataagcgtgttttctgagaaaactattaattgtatttatttttttgcttaaaagaaatgaaggttggtaatactggaattcgagtatgaacaaagaaagttttacattgttcgcattttcgacttgattgtaatatttcagtatgatatagtaagcagtggtgtcagtacaaagtacacacgtttactgatttaagtgttggtgctacgtttgtagtttcgcttagagatgaagtaaacggaggatatcaaaaaccatttaggaggaactatattatgtcagtaatttctatgaagcaattgcttgaagctggtgttcatttcggacatcaaactcgtcgttggaacccaaaaatgaagcgttacattttcacagagcgtaacggtatctacatcatcgacttacaaaaaactgtgaaaaaagttgaggaagcttacagaacgatgcgcgacatcgctgctgaaggcggagacatcttattcgtaggtactaaaaaacaagcacaagaagctattaaagaagaagcaactcgtgctggtatgtacttcgttaaccaacgttggttaggcggaactttaacaaacttccaaacaatccaaaagcgtatcaagcgtcttaaagacatcgaaagaatgcaagaagatggtactttcgaagtacttcctaagaaagaagttgttcaacttaaaaaagagttagagcgtcttgagaaattcttaggcggtattaaagatatgaaaggtcttccaagtgcattattcgtagtagaccctcgtaaagagcgtattgcagttgctgaagcacgcaaattacacattccaatcatcggtatcgttgatacaaactgtgatccagacgaaatcgatcacgttatcccagcaaacgatgatgcaattcgtgctgtaaaacttcttacatctaaaatggcagacgcgatccttgaagcaaaacaaggtgaagaaactgttactgcgtaacaaagttggaaaggtgataaggggttcggccttttatcaccttttttaaggtataaacacctttataaaaggtataaatacatattttaggaggatgaaaagtatggcaatcactgctcaaatggtaaaagaattacgtgaaaaaactggcgcaggtatgatggactgcaaaaaagctttaacagaaactaacggcgacatggagaaggcaattgacttcttacgtgaaaaaggtattgcgaaagctgctaaaaaagctgaccgcattgctgctgaaggtttaactttcatcgaaacaaacggtaacgacgctttaatcttagaattaaactctgaaactgatttcgttgcgaaaaacgaaggtttccaaacactaattaaagaattagctgctcacttattaactaacaaaccagctaacgttgaagaagctatggctcaaacaatggaaaacggtaaaaaagttgaagagcacatcaacgaagcaatcgctaaaattggtgaaaaacttacacttcgtcgtttcgaaatcgtatcaaaaactgatgcagatgcattcggcgcttacctacacatgggtggacgcattggtgtattaacagttcttgaaggttctactgatgaagctgctgctaaagatgttgcaatgcacatcgctgcagttaaccctaaatacatcgaccgcgatgctgtaacagctgaagaagttgagcatgagcgtcaagtattaacacaacaagcattaaacgaaggcaagcctgagaaaatcgttgcaaaaatggttgaaggccgtttaggcaaattcttcgaagagatttgcttacttgaccaagcattcgttaaaaaccctgatatgaaagttcgtcagttcgttgagtctaaaggcggaacattaaaaggattcgttcgctacgctgttggtgaaggtatcgaaaaacgcgaagacaactttgctgaagaagtaatgaaccaagtaaaaggtagcaactaatacagattagggaacacattgtgttcccttttttaaaataaagatgtaagcaattggaggttcattatgagtaaaccgaaatataatcgtgtcgttttaaagctaagtggagaagctttagctggagagcaaggatttggaattaacccaactgttattaagtcagttgcggaacaagtaaaagaaattgcagaacttgatgtagaggttgctgttgttgttggtggcggtaacatttggcgtgggaaaattggaagtgaaatgggcatggatcgtgcaggggcagattacatgggcatgttagcgacagttatgaattcattagctcttcaagatagcttggagaatatcggaattcaaactcgtgtacaaacttcaattgagatgcgtcaagttgcagaaccttacattcgtcgtaaagcagttcgtcacttagagaaaaaacgtgttgttatctttgcagcaggtacaggtaacccatacttctctacagatacaacagcagcattacgtgcggcagaaattgaagcagatgtaattttaatggcgaaaaacaatgtagatggtgtatataatgcggatccatctattgatccaacagctacgaaatatgaaacgcttacttacttagacgtattaaaagaaggtttaggtgtaatggattctacagcttcttctctatgtatggataatgatattccattaattgtattctcagttatggaaaaaggtaatattaaacgtgccgttttaggcgaaaatatcggaacagtggtaagggggaaataaatatgggacaacaagtattgaagtcttcaaatgaaaaaatggaaaaagcagttgctgcttattctcgtgaattagcaacagttcgtgctggccgtgcaaacgcgtctgtattagataaggtacaagttgattactatggtgcaccaacaccagttgtgcaattagcgaacattacagttccagaagcgcgtttactagtaattcaaccttatgataaaacttctatcggtgatattgaaaaagcaattttaaaagcagatttaggcttaaatccttctaatgatggaactgtaattcgtattgcattccctgcattaacagaagaacgtcgtcgtgatcttgtaaaagttgtgaaaaaatatgctgaagaagctaaagttgctgttcgtaacgtacgtcgtgacggaaatgatgatcttaagaagcttgaaaaagctggcgagattacagaagatgatttaagaggatatactgaagatatccaaaaagaaacagataaatatattgcaaaagttgacgaaatcgcaaaaaacaaagaaaaagaaatcatggaagtgtaatagcgataacttcgcaattatgaccctcttcttaagggggtctttttacacttttaggcatacgtctgcttgctggagggtatgaatgatgtttaaaaactttcctttttttaaaggtaaaaaggacacatcgtttgatcatctcgttgaagaagtgaaaaaaggatatatcccagaacatattgccatcattatggatgggaatggaagatgggcaaagaggagagcaatgcctcgtattgcgggacatcatgaaggtatgcaagttgtaaagaaaattacaaaatttgcaagtaaacttaatgtgaaagtgttaactctttatgctttttcaactgagaactggaaaagaccgaaaaaggaagttgattatttaatgaagcttccagaagaatttctaggtacatttttaccagaattgattgaagaaaacgtacaagtccgagtaatagggcaaaaagatcgtcttcctacgcatacacgcagagcgatggagaaagccatggaagatacgaaagagaatacgggattaattcttaatttcgcgttaaactatggaagtcgagatgaaatcgtttctgctgtgcaacatatgatgaaagataatgaggaaggaaaaattcgttctgaagaggtaagtgaagaaatgctttcctcctacttaatgacgagttctttacctgatccagagttgttaatccgaacaagcggagagctacgtattagtaatttcatgttatggcaaattgcatattcggagttttggtttacagacgtgtattggccagacttcaaagaagaacatttgctaaatgcgattactgactttcaacatagagggcgcagattcggaggcgtgtagaaagagagggtttggtagtgaaacagagaattattactggagtggttgctgccgcgctattcattcccatcgtaatatacggtggcgtgccttttacggttttagtgtatgcacttgcttctataggtttatatgaattaattcgtatgaataagcttacgcttatttcagtaccgacagttttagctgcagtattattgtggattcttttaattccaagtagtgcatcagaactgtttacatggattggattaggtaaattggaaatcacatttgtgattgttttattacttttatcatatacagtcctttctaagaatacatttacttttgataatgcttcatttttactgatggcaacgacatatgtggcaatgggattcttatatttaaatgaaacgagaatattaggaattaaatatgtattttgcgcattatttgttatatgggctactgattcaggcgcatatttcgtaggaaaagcattgggcaagagaaaattgtggccagaaatcagtccaaataaaacgattgaaggttcattagggggcatcgtttgtggaattattgtggcacttgtttacaacgtgttcttcccagtcgaatcgaatgtagtaattttaattgtgctgacaattattatttctatttttggacaaattggtgatttagtacaatctgcttttaaacgtcattatggcgtaaaggattcaggtacaattttacctgggcatggtggtatattagaccgaacagatagttggttattcgttttaccaattctctacttcttattacaatataattaataaatgaacgaggggttggagtcatgaaaaacattagtttattaggtgcaagcggatcaattggtacacaaactttagatgtattacgctcgcacccagaccaattccgtctcgttgctttttctgtagggaaaaatattgactacgcagtaaaggtaattcaagaattttctccgcaaatcgtctctgtgcaaagagaagaagatgttttaaaattacaatctgtttcaggtaatacaaaaattgtatatggtagtgaaggacttttagaagtagcactacatccagatgcggagattgtagtaaatgctgttgtaggtagcgtagggttgttaccaacacttcgtgcaattgaggcgaaaaaaacaattggaattgcaaataaagaaacgttagtaactgcaggacatcttgtaatggaagcagcacgaaaacataatgtttcgttacttccagttgatagtgaacattcggctatttttcaatgcttgaatggtgaaaatgaaaaaagaatttctcgtcttattataacggcttctggtggaagtttccgcgataaaacgagggatgaattgcatcatgtgaccgtagaagatgcgcttcgacatccaaactggtcaatgggttcgaaaattacaattgattctgctacaatgatgaataagggactagaagtaattgaagcacattggctttttggtattccttatgagcaaatcgatgttgttttacataaagaaagtattatccattctatggttgaatttgaagatcgtagtgtaatggcgcagcttggttcacctgatatgcgagtaccaattcaatacgcacttacatatccggatagattgcctctttcagacacaaaacagttaaacttatgggaaatagggacgttgcattttgagaaaatggaccaagaacgattccgttgtttacgttttgcgtatgaagctggaaaagcaggtggaagtatgccagctgtaatgaacgcagcgaatgaagtagctgttgaagcctttttacaaaagagaattgatttcttaacagtggaagacctcattgaaaaagcaatgaaccatcacaatgtcattgcacgaccgagcttagaggaaattttggaaattgatgcggccacaagacggtttgtgatggaacaaatttagcaaaggtggttatggaattgaatacagcgattgcctttatattaattttcggtgcactcgtatttttccatgagctagggcatctatatttcgcaaaaagagcaggtattttatgccgcgagtttgcgattggttttggtccgaaaatattctcatttgaaaagaatgaaacggtgtatacgattcgattactgccccttggtggctatgtaagaatggctggcgaggatgcggacacagttgagttaaagcctgggaaaaaggttggccttgtattaaatgaaaaagacgaagttgtgaaattagtttttgatggatatgaaaagtatccaaatgttcgtgttattgaagtcgaacaagctgatttggagcataatttaacaatttcgggctatgaagagtacgaggaagagcttcaaacattccgagtgaatgaaaaggctcgtattattactgcgggggaagaaattcaaattgccccgtataatagacaatttggctcgaaaaaactagggcaacgcgctttaacaatctttgcgggtcctgcaatgaacttcattttagcatttgttatttttgtgattcttggatttgtacaaggggttcctgttgacaaaccaatggtcggaaaagtgatggataacagtgcagcacagcaagctggattgaaagagaatgatacaattcaagctattgatgggaaaaacacaagtacatggaaagatgttgttactattgtacgtgaaaacccaaataaagaaattacgttacaagtaaagcgtgataatgaacagtttaatgtgaaagtaacgccaacactcgataaagaaggtaaagaagaagttggtagaattggtgtctactctcctgtagagaaaacagtgatgggttctattaaatcaggttttgaacaaacgtaccaatggacgaaactaatttttgagtctcttgtgaaattagtaactggtcaattttctattaatgagttgtcaggtccagtaggaatttataatctaacagatcaagttgtagattatgggtttacgcgtgtactaagtttagctgcagttctaagcattaatcttggtttatttaatttattaccagttcctgctttagatggtggccgtttattcttcttcttaattgaagcgttacgagggaaaccaattgatcgccaaaaagaaggaatggttcactttattggttttgcattattaatgttacttatgttagttgtaacttggaatgacattcgtaagtttttcttgtaaaataaagtgaaacttataatgaaatagagctcgtagaataaaatccctcacctaactcgaggtgaggggttttactgcgtgtaagagtaaaatgaagaggtgcaaataaatgaaacaaagtatggtattcagtcctacattacgtgaagttccagctgatgctgaaattaagagtcatcagctattacttcgtgcaggttttatgcgtcaaaatgcttctggtatttatagctttctaccatttggattaaaagtattacacaaagtagaacgtatcgttcgagaagaaatggagcgcgcaggagctgtagaattattaatgccagctatgcaagctgcagaattatggcaagaatcaggtcgttggtattcttacggatctgaattaatgcgtatgaaagatcgtaacgctcgtgaattcgcattaggagcgacacatgaggaagtaattacggatcttgtgcgtgatgaagtgaaatcatataaaaaattaccgttaacattataccaaattcaaacaaaattccgtgatgagcaaagacctcgtttcggcttattacgtggaagagagtttctaatgaaagatgcctactctttccatgctacacaagagagcttagatgaagtatacgatcgcttatataaagcatactctaacatttttactcgctgtggcttgaatttccgtgcagttattgctgattctggagcaatgggcggaaaagatacacatgaatttatggtattatctgatgttggtgaagatacaattgcatactctgacacatctgattatgcagcaaacatcgaaatggctcctgttgtagctacgtatacgaagagtgacgaagcagaaaaagcacttgaaaaagtagcaacaccagaccaaaaagcaattgaagaagtatctgcattcttaaacattgcagctgacaagtgcattaagtctatggtgtttaaagtagatgagaaattagtagttgtacttgttcgtggtgatcacgaagtaaacgatgtgaaagtgaaaaatgtatatggcgcttcagttgttgagcttgcttctcatgaagaagtaaaagcattattaaattgtgaagttggttcattaggaccgattaatgtaacaggtgatatcgaaattattgctgatcacgctgtagcatcaattgttaacggatgttcaggagcgaatgaagaagggttccattatgtaaatgtaaatccagaacgtgactttaaagtaagtcaatatacagatttacgctttattcaagaaggagaccaatctccagatggaaacggaacaattcttttcgcacgcggaattgaagttggtcatgtattcaaattaggaactcgttatagtgaagcaatgaacgcaacattcctagatgaaaatggaaaaacacaaccacttattatgggttgttacggtatcggtgtatctcgtacagtagcagcaattgcagagcaatttaacgatgagaacggcttagtttggccaaaagcggtagcaccgttccatgtgcatgtaattccagtaaatatgaaatctgatgcacaacgtgaaatgggtgaaaatatctacaactcattacaagaacaaggctatgaagtgttattagacgatcgtgcagaacgtgcaggtgttaaatttgcagatgcagatttattcggtcttccagttcgtgttacagttggtaaaaaagcagacgaaggtattgtagaagtgaaagtacgtgctacaggtgagtctgaagaagtaaaagtagaagaacttcaaacatatattgcaaatattttaaaataagaagaggtacctcgtaatggggtaccttctctttctttgtaaacgtattttgtaaaagaagaggtgagaaatctttctttgtggtacgtttcaatttataatagcaaatggaaggagagtgcttatgtctttaacaaatgaacaacaagagcgatttcaaattttgctccagcagttgcaaataccagacgaccttataaatcaatatttacaaggcggtggtattgaaaggctcgttattgataaagcgaataaaagttggcattttgatttacaagtgccacgtattttgcctacagaattatatgaattgctagaaacaaagcttaagcaatcattttctcatattgcaagaacaacatttgcattagaaacagagaataaacaatttacagaagaagaagtgagggcgtattggccgctttgtacggaacgaattacattttcacctatgttcgcatacttaaagaagcagcttccacaggtgaatggagtgaagttgttaataaatgtaaataacgagctggagtctacggctttaaagaaaaacgttgcgaaaccagtaggggatcaatacgaagtttttggattcccgcgttttcagttagacacacatatacagcaaaatacagaagaaatgcaaaagtttcgtgaacaaacgcagcaagaagaccgtgagcgtgttatacaagctatggaagaaatggcgaagaagcaagctgaagaaagcagcgttgtgtatgaaggaccgattacactcgggtatcttattaagccagatgaagagattacaccgatgcgagaaattcaagatgaagaaagaagaaaaacggttcaaggatatgtcttccatgtagaaacaaaagagcttcgtagtgggcgtacgttattaactttaaaaataacggattatacggattctattatgatcaaaatgttctcgcgtgacaaagaagatattccaatgctgcaatccttgaaaaaaggaatgtgggtgaaagcgcgtggttctgttcaaaacgatacattcgttcgagatttagtaatgattgcaaatgatattaatgaaataacaggaccgtctcgtaaagataaagcaccagaaggcgaaaaacgagtagagctgcatctccatactccgatgagtcaaatggacgctgtcactccagtttctaagcttgttgctcaagctggtaaatggggacatgaggctattgcggttacagatcatgccgtggctcagtccttcccagaggcgtattctgcagggaagaaggctggtgttaaagttatatatggtgtagaagcaaatctagttaatgatggtgtaccgatagcgtataacgaagcgcatcgtttacttgcagaggaaacgtatgttgttttcgacgttgagacgacaggtttatcagctgtatacgatacagtcattgagttggctgccgtaaaagtaaagggtggcgaaattattgatcgctttgaatctttcgcaaatccacatcaaccattatcagcgacgattattgaattgacaggtattacggatgatatgttaactgatgcacctgaagtggacgaagtgtttaaaaagtttgaggaatggatgggcgaccatacacttgttgcccataacgcgagctttgatatgggctttattaacgtaggttttaaaaaggctggactagaaaaaacgaataatccagttattgatacgttagaacttgcacgatttttattcccagaaatgaaaaatcatcgattaaatacgatgtgtaaaaaacttgatattgaattaacacaacatcaccgtgcgatttatgatacagaagcgacgggatatttacttgtgaaaatgttgaaagacgtaattgaaaagggatttgaatatcacgatcaattaaatgatagcatgggacaaggggatgcgtataagcgtggccgtccaagtcatatgacgttacttgccacatcagatgttggattgaaaaatttatataaacttgtttcatattctcaccttaattacttttaccgtgtaccacgtgtgccgagatcactattaaaaaaatatcgtgaagggattttagtaggaacggcttgtgataaaggtgaagtgtttgaggcaatgatgcaaaaggcacctgaagaggtagaagaaattgcccagttctatgattacattgaagtaatgcctccagaggtgttgcgtcatttagtagaacgtgagcttgttcgagacgaaggtcaattaaaaacaattatttctaacttagtaaaactaggtgagacgttagataaaccagttgttgctacaggaaacgtgcattatttagaccctgaggatgcgatgtatcgtaaaattttagtcagttcgcagggcggagccaatccgttaaatcgacattcattaccgccagtacatttccgtacaactgatgagatgttagaatgtttttcattcttaggtgaagacaaagcgaaagaagttgttgtaacaaatacacaaaagattgcgtcattaattggtgatgtgcatccagtaaaagacgatctatacacaccgaaaattgaaggtgctgatgatgaaacgcgtgatatgagttataaaatggcgcgtagcatttatggtgaagagttaccggaaattgtagaagcacgtttagaaaaagaattaaaaagtattattgggcatggattcgccgtaatttatttaatttcacataagcttgtgaaaaaatcgttagtagacggatatctagtaggttcgcgtggatcggtagggtcatcatttgttgcaacgatgatggaaattacagaagtaaacccattaccaccacactatgtatgtccgaagtgtaagcaatcagaattctttaatgatggttctgtaggttctggttttgacttaccagataaagaatgtcctgcttgtaatattccatatgtaaaagatggacatgacattcctttcgaaacgttccttggatttaaaggagataaggtgcccgatatcgatttgaacttctccggggaataccaaccacgtgcccataactatacgaaagtactgttcggtgaagactatgtatatcgtgcaggaacgattggtacagttgcggaaaaaactgcttacggatatgtaaaaggttatgcaaatgatcataacttaacgattcgaaatgcagagattgatcgcttagtagcagggtgtaccggtgtaaaacgtacaacaggacagcatccaggcggtattatcgttgtgccagattacatggatatctttgatttctcaccaatacagtacccagctgattcaattggtgctgaatggagaacaacgcattttgatttccactcgattcatgataatttattaaaacttgatatactaggacacgatgatccgaccgttattcgtatgttacaagatttaagtggtattgatccgaaaacaatcccaacggatgatccagaagtaatgaaaattttctctggtccagaatcgttaggggtaacggaagagcaaattaactgtaaaacaggtacacttggtataccagagtttggtacaaaattcgtaagacagatgttagaagagacaaaaccgacgacattctcagagttagtccaaatttctggactatcacatggtactgacgtatggcttggtaatgcaaacgagttaatttataacggtacatgtacgctgagcgaagttatcggttgtcgtgatgacatcatggtatatttaatctatcaaggtctagatccatcattagccttcaaaatcatggagtcggttcgtaaaggtaaaggtgtaccggaagaatgggaagaagacatgaaaaataataatgtaccagattggtatattgattcatgtaagaagattaaatacatgttccctaaagcccatgcggctgcttacgtacttatggctgtacgtatcgcatactttaaagtacattttgcactgttattctatgccgcatattttacagttcgtgcagatgattttgatgtagaggcaatggcgaaaggttcagcatctatacgtgcaagaattgatgaaattgctcaaaagggactcgatgctgcgccgaaagagaagagtttattaacagtactagaaatgacacttgaaatgtgtgagcgtggatactcattccaaaaggtggatttataccgctcacatgcaacagaatttattattgatggagacacattaattcctccatttaatgcggtacctggtcttggtacaaacgcagctttaagtattgtggaagcacgtaaaaatggagacttcttatcaaaagaggacttgcagcagcgtagtaaggtttcgaaaacaattattgagtatttagatagtcaaggttgtttaggagatttaccggatcaaaaccagttatcactgttctagtaggtaggaaaagtctttgcaaatcaacatttcctatgatatactattaaccgagataaccatgtcatgtatattgtgtaaagaaaagagtggggaaacccactctttcgtgttactatctatgttttctctacgtagataggtaaaagatttctgtcgtatatacatattttgttacaagttttacttcttaaatttggtaatactaagacagataatccctgctgaacagcaggggcttttgttagctaacgagaaagaataagatagaccgtttttaaagtggcggggtcttcttcttttaaatggtacatgacggcaggaaggaggctgtttatggataagaaagtcacagaagttgtagaagcatttgcgcagccgatcgttgaagagttaaatcttgaacttgtagatgtagagtatgtgaaagaaggacaagactggttcttacgcgtattcatcgattctgaaaagggagtcgacattgaagaatgcggtgcggtaagtgaacgtttaagcgaagctttagataaagaggatccaattcctcatctttactttttggatgtatcatctcctggagcggaacgcccattaaagaaagaaaaagacttccagcaagcggtaggaaaacaagtggcaattaaaacatatgagccgattgatggtgaaaagatgtttgaaggaaaactgctttcttacgatggtacaacaataacattattattaacaattaaaacacgtaaaaaagaaatccaaatttcgatggataaagtcgcaaatgcgcgacttgctgttacgttttagttagaagggggatcttcatgagcactgagttattagatgctttgctcgtattagaatctgaaaaaggcattagcaaagacattattattgatgcgattgaagcagctttaatctctgcttataagcgcaattttaatcaagcacaaaacgttcgtgtgagctttaacccagaagtgggaacaattcaagttttagcacgtaaagacgtagtagacaatgtgtttgatccacgtcttgaaatttctgtagaggaagcaagacaaattaatccaaactaccaagatggtgacgtactagaaattgaagtaacaccaaaagactttggtcgtattgcagcacaaactgcaaaacaagttgtcacacaacgagtgcgtgaagcagagcgcggtgttatttactctgagtttagtgaccgtgaagaagatattatggtaggtattgtacaacgtcaagatgctcgtttcatctatgtaagcttaggaaaagtagaagctttattacctgtaagtgagcaaatgcctaatgagcaatacaaaccacatgatcgtattcgcgtattcattacgaaagtagaaaaaacgacaaaaggaccacaaatttacgtatcacgtacacatcctggtcttttaaaacgtttattcgaaatggaagttcctgaaatctatgatggaactgtagaaattcgttctgtagcacgtgaagctggcgatcgctctaagatctctgtatatgcagagaacactgatgttgatccagttggttcttgtgtaggaccaaaagggcaacgtgtacaacgcattgtagacgaattaaaaggtgaaaaaattgacatcgtccgctggtcaaatgatccagttgaatatgttgcaaatgcattaagcccatcacaagttgttaaagtacttgtagatgaagaagaaaaagcgacaacagtagttgttccagaccaccagttatcattagctatcggtaagcgtggacaaaatgcacgtcttgcagctaaattaacaggctggaaaattgatattaagagtgagtctgatgcgaaacaacttggtattgtaacagaagaagatagcgtaatcgcatttggattcgattcagtggaagacgaaatcgaatagaggtgatgagtatgagcaatcgaaaagttccgttacgaaaatgtgttgcaacgcaagaaatgaaatcaaaacgagagctcgttcgcattgttcgttccaaagagggagaagtgtccattgatttaactgggaaaaaatcaggacgaggtgcttacttgtcgaaggacaaggagagcattcttcaagctcaaaagaaaaatgttttggaacatcatctaaaagcgaaaatcgacggttctttatatgaagagcttcttgagcttgttgagaaggagtcgaaataagtgtccgattggaaatcgtttttaggactagcaaaccgggctcggaaaattatttcgggtgaagaactcgttttaaaagaagtacgaagtggcaaagcaaaacttgtattgctatctgaagatgcgtcagtaaatactacaaaacgcatcacagataaaactacgtactacaacgtaccaatgagaaaggtcgaaaatcgacaacaattagggcatgcgattgggagagatgagcgagtcgttgtagctgtgttagatgtaggctttgcgaaaaagctgcgtagcatgctcgatacaaattaccgggggtgaaggtatgagtaaaattcgagtgcatgaatatgcaaaaaaacataatatctcaagtaaagatcttatgacaaaactaaaagaaatgaatatcgaggtttcgaatcatatgacaatgttagacgatgaagtagtaaataaattagataatgaatatcaaactgaaaaaccttctgttgcagatgagtttgaagtagaagaaaaagttgttcgcagtaaaaagaacagcaataagaaaaagaaaaaaggcaaaggaaacgaagacaaacgtcaagagaactttgctggtagacaacaaactcaaattgtagaaacaccagataaaattactttctctggaagccttacagtaggagatcttgctaaaaaattaagcaaagagccatctgaaattattaagaagctcttcatgcttggaattatggcaacaattaaccaagacttggataaagatacaattgagttaattgctaacgactacggtattgaagtagaagaagaagtaattgtaagcgagactgagtttgaaacattcattgatgagcaagatgatgaagagaacttaaaagaacgtccagctgtagttacaatcatgggacacgttgaccatggtaaaacaacattactggattctattcgtaactcaaaagtaactgcaggcgaagcgggtggaattactcagcatatcggtgcatatcaagttgaagtaaacgataagaagattacattcttagatacacctggtcacgcagcatttacaacgatgcgtgctcgtggagcacaagtaacggatattacaatccttgttgttgcagcggatgacggtgttatgccacaaacggttgaagcaattaaccatgcgaaggcagcaggagtaccaattattgttgctgtgaataaaatggataaaccagctgcaaaccctgatcgcgtaatgcaagaactaactgaatatgaattagttccagaagcttggggcggagatactattttcgtaccaatttctgcaattcaaggcgaaggcattgacaacttactagaaatgatccttcttgtaagtgaagtagaagaatataaagcaaatccaaaccgctatgcaactggtacagtaatcgaagcacagcttgataaaggtaaaggaactatcgcgacattacttgttcaaaatggtacgcttcgagttggagatccaatcgttgttggaacttcattcggacgtgttcgtgcaatggtaagtgatattggtcgtcgtgtaaaagttgctggtccatcaactcctgttgaaattactggtttaaacgaagtaccacaggctggagatcgtttcatggcatttgctgatgagaagaaagctcgtcaaattggtgaatcacgtgcacaagaagcgttagttgcacaacgtggtgagaaatctaaattaagccttgaagatttattccaacaaatccaagagggcgatgtaaaagaaattaacttaatcgtaaaagcagacgtacaaggttctgttgaagcgatggcagcatcacttcgtaaaattgatgttgaaggcgtaaaagttaaaatcattcacactggtgtaggtgcgattacagaatctgatatcattttagcttctgcatctaatgcaattgtaattggatttaacgtacgtccagatgtgaacgcgaagcgtacagctgaattagagaacgttgatattcgtttacaccgtattatttataaagtaatcgaagagattgaagcagctatgcaaggtatgcttgatccagaattcgaagaaaaagtaatcggtcaagcagaagttcgtcaaacgtttaaagtaacaaaagttggaacaatcgcaggttgttacgtaacagacggtaaaattacgcgtgatagtggcgtacgtattatccgtgacggcgtagtaattttcgaaggacaacttgatacgttaaaacgtttcaaagacgacgtaaaagaagttgcacaaaactatgagtgtggtattacaattgagagatataatgatcttaaagaaggggacatcattgaagcgtacattatggaagaagtgaagcgatgattatcgcttcactctcattcgagtgtatgatttacgatgtgcattctttaaaagagaaacgtgcaattttacaacgtgtgttaactcgtgtaaaacagcgctataatgtagctgtttctgaagttgggcaccaagatgtatggcaacgtacagaaattgcaattgtttccgtatcctcaaatcgtgttatctgtgagaaagaaatgaatcgtgtacttgagtacatcgattcatttcctgaaattgaacgtacaataacacatttggaatggtattgaatgaggtgaagagttatgaaattacgtgcgaaccgtgtgggcgagcaaatgaaaaaagaattaggcgacattatcagtcgtaaaattaaagacccacgtattggatttgttacagtaactgatgtacaagtgagtggtgatttacaaattgctaaagtatatatttctgttttaggtgatgaagaacagaaagaaaatactttaaaaggtttagcgaaggcaaaaggctttattcgttcagaaattggccaacgtattcgtcttcgtaaaacaccagaaattacctttgagtttgatgagtctatcggatatggtcatcgaattgatacacttttacatgaaattaataaagacggtaaacgtgaagaataatggatagacatttgtctatccattttttcaatgcaaaataagttttggatatttactacgagagaattatgatgaggtgaacatatatggaaggtgtagtattattacataagccaaaaggcatgacatcacatgattgtgtatttaaattaagaaagatattgcgagaaaagagaattggtcatacgggaacattagaccctgatgtaacaggagtattaccaatttgcgttggaagagcaacgaaaattgcacaatttttaacaagtgaaacgaaaacatatgaaggtgaagtaacattagggttttcaacgacaactgaagatgcttctggtgaggttgttgaaacgaaaaatgtagatcgtactattactcgtaaggaagtagagaaagtccttgcggaattaacaggcacgattgaacaaatgccaccaatgttctcggctgtaaaagtaaacgggaaaaaattatacgaatatgcaagagcagggcaagaggtggaacgtccagttcgtacaattacaattcatgaattcatattacttgatgatcgtgaagtttttgaaggagaaaatatttcattccgtttccgtgtaacgtgtagtaaaggaacatatgtaagaacgttagctgtaatgatcggggaaaaacttggtttcccatcacatatgtcgcaccttataagaacggcatctggtgaatttttattagaagattgcatatcatttgaagaaattgaagaaaacgtgcaaaatggaacagtagagtctatcttcatttcaattgatgaagcattaagtaagtttccaaaaatggttgtagatgaaaagcaagcagagaaaataaagaatggtatgttcttaaaaaatgaattagaaataacagcaccatttattacagtgtttgataaaaatgatcgttgcttagcaatttatgaacatcatccgaaacatcctggtatgttaaagccgatgaaagtacttgtgaataatcaagaactaaagctataatgaattattggaaggattattacagaaaaaggtgaattcaagcgtgaaacttattcatttaactcatccacatgaacaaaataaattagaattaccacctactgtaatggcattaggattttttgatggcattcatttaggacatcaatgtgtaattcgaactgcgaaaaaaatagcggacgaccgaggatataaaagtgcagttatgacatttcatcctcatccatctgttgttttaggaaaaaaggatgcgcatgtggagtatattacaccgatgcgcgataaagaaaaaatagtcgaaagcttaggaatcgatatattatatgtaattaaatttgatgaatcatttgcagggttattaccgcaacaatttgtagatgattatattattggtttaaatgtaaagcatgtagtagcagggtttgattattcatatggacgtttaggaaaaggaaagatggagactttaccatttcatgcaagaggggagtttacacagactgtgattgaaaaagttgaatttcaagaagagaaagtaagttctacagcattacgaaagttaattcgaaatggcgaaatggagcaaattccatctattttaggtagagcctatactgtagcgggaacagttatacacggcgacaaacgtggacgtcaaattggttttccaacagctaatgtaggtttaagtgatgagtatttattgccacctgtaggtgtttatgcagtgagattaaaagttcacggtgaatggtacgatggtgtatgtaatattggatataaaccgacttttaaagaagatgagcgtcaattatcaattgaagtgcatttatttgaatttaacaaagatatatacgatcaaaatgttacagtagagtggcatatgcgtataagagcagaaaagaaattcaacggtatcgatgagttagttgaacaaatcgcaaaagataagaaaacagcccaagaatattttgtgagcgaaaagaatatacttgctttttcaaatgaaaagtagtattctatgttatgtactttatgacaaccattgcttggcattgcgactcaccgacgcttgctaggtaattgggggtttaattaataggaggtgaaataggatggctttaacacaagagcgtaaaaatgaaatcattgcacaatttagaactcatgagactgatactggttctccagaggttcaaattgctgtcctaacggagcaaattaacactctaaacgagcacttacgtactcacaagaaagatcatcattcacgtcgtggtctattaaagatggttggtaaacgtcgtaacttactaacttaccttcgtaatagcgatatcacacgttaccgtgaattaatcacaaagcttggcttacgtcgatagtcaaagaagcgggaatattcccgcttttttgttaggtaaaaatatatcttctacgctttatagcttacttaattttaggcaatactagaggtagaatattgtgatatactatccatttacatagaagaattgaatactttaaattgagaggggtacttaaatgagtcaagaaaagcaagtcttctcgatagatttagctggtcgccagctaacagttgaaactggtcagcttgcaaaacaagcgaacggagcagtattagtaagatatggcgatacagcggttctatctacagcaactgcatcaaaagaagcaaaaaatgtagatttcttcccacttacagtaaactatgaagagcgtttatatgcagtcggaaaaattcctggcggtttcattaaacgtgaaggtcgtccaagtgaaaaagcaattttggcaagtcgtttaatcgaccgtccaatccgtccacttttcgcagatggtttccgtaacgaagtacaagttgtcagcatcgtaatgagtgttgatcaagattgttcttctgaaatggcagctatgcttggttcttcattagcgttatcgatttcagatattccatttgaaggtccaatcgcgggtgcaacagttggtcgtattaacggcgaattcgttatcaacccaacagtagaacagcaagaacaaagtgatattcaccttgttgtagctggtacgaaagatgcaattaacatggttgaagcaggagcagatcaagtgcctgaggaaacaatgttagaagcaattatgtttggtcatgacgaaattaaacgtctaattgcattccaagaagagattgtacaagctgtaggtaaagagaaatcagaagtgaaactttatgaagttgacgctgatcttaaccaagctgtacgtgaaatggctgaagaagatatgcattcagcaattcaagtacatgagaaacatgcacgtgaagatgcaattaacgaagtgaaaaagcgtgttattgagcattacgaagcgcaggaagctgacgctgatacattaggacaagtaaatgagattttatataaaattgtaaaagaagaagtacgtcgtcttattacagttgaaaaaatccgcccagatggccgtaaaggtgacgaaatccgtccattagcatcagaggttggcattttatctcgtacacacggttctggtttgttcactcgtggacaaacacaagcattaagtatttgtacattaggtgcattaggcgatgtgcaaattttagatggtcttggtgtagaagaatcaaaacgctttatgcaccattacaatttcccatcatttagtgttggtgaaactagaccaatgcgtggaccaggtcgtcgtgaaatcggtcacggtgcactaggagaacgcgcacttgagcctgtaattccatctgaaaaagatttcccatacacagtacgtcttgtatctgaagttttagaatcaaatggttctacttcacaagcaagtatttgtggtagtactttagcaatgatggatgctggtgttccacttaaagctccagttgcaggtattgcaatgggtctagttaaaactggtgagcattacacaattttatctgatattcaaggtatggaagatcatttaggtgatatggactttaaagtagcaggtacagcacaaggtgtaactgcactacaaatggacattaaaatcgatggtctatctcgtgaaattttagaagaggcattacaacaagcgaaagttggtcgtgtgcacattctaaatcatatgttatctgttattccagagccacgcactgaattatcagcgtacgctccaaagattattacaatgacaattaatccagataaaatccgtgacgttatcggaccgagcggtaaacaaatcaataaaattattgaagaaactggcgttaaaattgacatcgagcaagatggcacagtattcatttcttcaataaaccaagaaatgaacgacaaagctaagaaaattatcgaagatatcgttcgcgaagtacaagtaggtgaaatctacgaaggaaaagtgaaacgtgttgagaaattcggtgctttcgttgaattattcagcggtaaagatggattagttcacatttctgaacttgcacttgagcgtgtaggtaaagtagaagacgttgtaaaaatcggtgacgtaattacggttaaagttatcgagattgacaagcaaggtcgtgttaatctatctagaaaagtattgctaaaagaagagcaagaaaaagaagctgctaaagaagaaaacaaacaagagcagcaataagcgaaagccagtttaactggctttttttgttatgtaaaaatatgatttatatatatttttatgtcagtataggtatagttttcattataacgctcaaattaacaaagataagaagaaaaatgtttttttatatagttaatttgggagggtttatatgaaagttcgtatattggcatacatatgtatattttctttatatgtcagtttaggctcttattctgtttttgcacaggataacttatatgaagaaattcaaaagcatgcaaaacaatatgagattgcacctcaaaatgcgatgattgataagatatggaaagcaacaccaggatataatggaagacaagttgatatggaagcatcctataacaatatgaagaagctaaaggaatttgatcaaaaacaccttgaatttaaggaagtatcaccgagtgtccacttagaagatttatcacctgctccaatttatagggggcatccgaataaaaagatggtgggattaacaataaatgtggcatggggaaacgagtatttgcctcgtatattagaaatattgaaaaagcatgatgtgaaggcgactttctttttagaaggacgttgggtgaaagaaaatttacgatttgcaaaaatgattgtcgatgcaaatcaagaagtcggaaatcattcttatacgcaccctaatatgaaaacgctatcgtctgatgaaatacgagagcagttacaaaaaacaaatcgaatgattgaagctgctacgaatcaaaaggtgagatggtttgccccgccgagtggaagttttcgggatgaagtcgtgaaaatcgctgatgatttccaaatgggaacgattatgtggactgtcgatacaatcgattggaagcgacctgagccagatgtactattgcagagagtaatgagaaaaatacacccaggtgctatcgtattaatgcatcctacttcgtcaacggcagaagcattagatacaatgattaaaaaattgaaggaacaaggatataaagtagggaatataacagaattactggatgaaaaacgtgtggattaaatacatttgcatgacattcatccttaaacttgttatcattaaataatagcacttatttagagaaactggcagtaggaggaaagtttttgattaaaaaatatacttgtaaaaatggtgtaagaatagttatggagaatataccaactgtaagatcggttgcgattggtatttggatccatgcgggatcaagaaatgaaaatgaaaaaaataacgggatttctcactttttagagcatatgttctttaaagggacagaaacacgtagtgcacgcgaaattgcagaatcatttgatagtattggtgggcaagtgaatgcttttacttcaaaagagtacacttgttactatgcaaaagtgctagatgaacatgctaaatatgctttagatgtattagctgacatgttctttaattcaacatttgatgaagaagaattgaaaaaagagaagaatgtcgtatgtgaagaaattaaaatgtacgaagatgctccagacgatattgtgcatgatatgttaacgaaagcaacatatgaaacgcatccgcttggatatcctattttaggaacagaagaaacacttgatacgtttacaggtgatacgctacgccaatatattaaggatcattatacacctgaaaatgtagttgtttcagttgcaggaaatattgatgaagccttcttacaaacggtagagcaatatttcggtagttatgaaggaacaacaaatcgcgaacaagtacatagtccaattttccattttaacaaagtagcacgtaaaaaggaaacagaacaagctcatttatgtttaggatataaaggcttacaaatgggacacgaagatatttataacttaattgtattaaataacgttttaggcggtagtatgagtagccgtttattccaagaagtacgtgagcaacgtgggttagcttactcagtattttcttaccattcttcttatgaagatacaggtatgttaacactgtatggtggaacaggtagtcaacaattagatacactgtatgaaacaatgcaagaaacattagaaacattgaaaaatacaggtattacagaaaaagagcttattaatagtaaagagcaattaaaaggaaacttaatgttaagtttagaaagtacgaatagtcgtatgagccgtaatggtaaaaatgaattgctacttcgtaagcatcgttcacttgatgagattatcgaaagtgtaaacactgtaacaaaagaaaatgtagatgggttaattcgtaacatgtttacagatgaattctctgcagcattaattagtccagatggaaaacttccaaaaggaataaaactataatcaacttttacgatgtatctgaaaataaccttctctctttttaaatgagagaaggttattttttttatacatatagaataggtactaattatagacaatgcaaatgaaaaatttagtaggggagtggagtgagtatgcgattaagtgaattaagcggtaaagaggttgtagatatagaaaaagcggaaaaaatgggagccttaggttatatggatttagagattaatgagaaagacggacaaatacaaacacttataatacctgtagggaagtggggaggttttaaaaaggaaccacaagaagtaagagtggcatggagtcaaataaagaaagtcggacacgatatgcttctttgtgatagtatagatcgttcaaattcggagtgaaggatggccattttggtcatctttttttgtatctacatagaaacctgataaatcatatgtgcatttggattttcaatcaccataaactcgtacattacatatgatgtggaggaaaaagaaaaagtaggcacttttcttataaatgacagaaaaagaaggtgaattagggaatgttgactgagatgcatattgctgtcataggaggagatgcaaggcagctagaagtaattcgtaagctagttgaattggatgcgaaactttctttgataggttttgatcagttagatcatggtttcacaggggcagcaaaagaaagtatacaaaatttagatttcacttctgtagacgcaattattttgccggttgccggtacaaatgccaaaggagaagtagatactattttttcaaatgaaaaagtttcaataacgaaagaacaaattgaaaatacaccagaacactttactatatattcaggtattggtacaccttacttggaaaatctcgtatctactacgaatcgaaaacttgttaaattatttgatcgtgatgatgtagcaatatacaattctattccaacggtagaaggtacattaatgatggtaattcaacataccgactatacaattcatgggtccaatgtaatggttctaggatttgggagaacaggaatgagtgttgcgagagcatttcaatcattaggagcccatgtcaaagttggagcaagacgatctgaacatattgcacgtattacagaaatgatgttttctccttttcatatgcaagacatagagaaagaagtaggaaatatcgatattgtaattaatacgattccgcatctcgttgtaacagcgaatgttattgcaaaaatgccagctcatacgttagtgattgatttagcttctaaaccaggcggtactgactttagatatgcggaaaaaagaggagtcaaagcattgctagcacctggattaccaggtattgttgccccaaaaacggctgggcaaattttagcaaatgttctttctcagttattagcagcagatgcaattgcaaaggaggaggaaaagaaatgagtttgaaggggaaacgaattggtttcggatttacaggttcacattgtacgtacgaagaagtaatgcctcatttagaaaaattaattgctgagggagcagaagtacgtcctgttgtttcttacactgttcaatcaacaaatactagatttggagaaggagcagagtggattaagaagattgaagaaataacaggttttaaagcaattaattcaatcgttggtgcagaaccactaggacctaaaattccactagattgtatggtaattgcaccactaacagggaattctatgagtaaatttgcaaatgcaatgacagactctccagtattaatggcagcgaaagcgacgttaagaaatggcaagcctgtcgtattggctgtttcgacgaatgatgctctagggcttaatggagtaaatctcatgcgcctaatggcaacaaaaaacatctacttcgtcccattcggccaagatgcaccagagaaaaaaccgaactcaatggtagctcgcatggagctgctggaagatacagtgttagaagcgctgcaagggaagcaattgcaaccggtggtcgtagaaaaattcagatatatgaattaaaaaacgaaaaaaaacggacaatttttgatgaaaccatcattcttactgtagaatatgataaaattaacgttattaagattagaaggggtattgtatactccttctgattctaagttatagaaggattggtatctagaaaggggcatagtgatggaaaagcaaaaaacttttcatgtcgctgtagttggagcaaccggcgcagttggtgaacaaatgttaaatactttagagaaacgagaatttccaatcgggaaattaacgttactttcatctaaacgatctgcaggtaagaaacttgtatttaaaggcgaagaatttacagttcaagaggcaactcctgaaagctttgaaggagtagatatcgcactatttagtgctggtggatctgtatcgaaacaattagcgccagaagcagcaaaacgcggtgcgattgttgttgataatacaagtgcattccgtatgacagaaaacgtgccacttgttgtacctgaagtaaatgaaaacgacttaaaagaacataatggtattattgcaaatccaaactgttctacaattcaaatggtagtagctcttgagccagttcgtcagcaatatggtttaaaacgagtaatcgtttccacatatcaagctgtatcaggtgctggtgcggcagctattgaagcactgcatgaacaatcacaagcaatcttaaatggcgaagaagttaaggcaaatgttcttcctgtatcaggtgataagaagcatttcccaattgcttttaatgcgattccacagattgataaattccaagataatggatttacgtttgaagaaatgaaaatgattaacgaaacgaaaaaaattatgcatatgcctgaattagaagtagcggcaacatgtgtacgtttaccagttgtatcaggacactctgagtctgtttacatcgaagtagaaaaagaaggcgtaacagtagcagaattaaagagcttacttgcaaatgcggaaggtattgttctgcaagataatccagaagagcagttatatccaatgccagctactgcagtaggtaaaaacgaagtattcgttggaagaatccgtaaagatttaaataacgataaaggattccatctttgggtcgtatctgataacttattaaaaggcgctgcatggaattctgttcaaattgcagagcgcttagtaaaattacaattagtgtaaacggctaagagaaggtgcaaaatatgaaaataattgttcaaaaatttggtggcacatcagtacgtgatgacaatggacgtaagcatgcgcttcatcatataaaaaaatcattagctgctggttataaagtagttactgtcgtatctgctatgggccgtaaaggtgaaccatatgcaacggatacgttattaagtcttgtaaatcaagaggaatctactatttctaaacgtgagcaagatttattattatcatgcggagagttaatctctgcaattgttttctctaatatgttgaatgagaacggtataaaagcagcagcattaaatggtgcacaagctggttttgtaacgaatgatgactttacgaatgcaaagattattgaaatgaattgcgatcgtatacatgaagagttagaaaatgtagatgtaatcgtcgttacaggatttcaagggcaaacgaaaaaaggtgatacgacaacacttggacgcggaggtagtgatacttcagcttcagcattaggtgttgcacttcatgctgaatatatcgatatattcactgatgtagaaggtgttatgactgcggatcctcgtattgtaaaagatgcacgtcatcttcaaactgtaacgtataacgaaatttgtaacatggcttatcaaggtgcgaaagtcgttcatccacgtgcagttgaaattgcgatgcatgcaaaagtgccacttcgtgtacgttctacgtattctgaaagtgaaggtactcttattgcagcatacgatggtgctacaaaagggcaggatgtagaagaacgtcctgttacaggtattgcccacgtatcgaacgtaacgcaaattaaagtacttgcaaaagaaacggcatacgacatacagcagcatgtatttaaagaaatggcaaacgaaggcattagtgttgatttaattaacatttctcctactggtgtagcttacacagtaaatgataatgtatcagctcgtgctgtcgaagtgctaaaacaacttggatatgagccaattgtgacagaacattgtgcgaaagtatctatcgttggagctggaatggcaggcatcccaggggttactgcaaaaatcgttacagctttagcggaaaaaggcattcaaatcctgcaatcggcagatagtcatacaacaatttgggttcttgtaaaagaaattgatttagtggaggctgtaaatgcattacatagtgcgtttgagctttcaaaagaaaagcaactggaacaataaggagtgagaccatgatagattttgggacaattgcaaccgcgatggtaacaccgtttgatataaacgggaatatcgattttgcaaagacaacgaaattggtaaattatttaattgataacggtacaacagcaatcgtggtaggaggaacgacaggagaatctcctacattaacttcagaagagaaagtagcgttatatcgccatgtcgtatctgttgtcgataaaagagtgcccgtaatcgctggaacaggtagcaataatacgcatgcttctattgacttaactaaaaaggcaacagaagttggagtggatgcagtaatgctagtagcaccgtattataacaaaccgagtcaagaaggaatgtatcagcattttaaagcaattgctgaaagcacgccgcttccggttatgctatataacgttccaggacgatctattgtacaaatctccgttgatacagttgttcgtttatcagaaatagaaaacattgttgctattaaagatgccggcggcgatgtgttaacaatgacagaaatcattgaaaaaacagcggacgactttgcggtatacagcggtgatgacggtttaacgttaccagctatggcagttggagcgaaaggtatcgtttcggtagcctctcatgttatcggaaacgaaatgcaagaaatgattacagcatttcaatcaggagaatttaagaaggcacaaaaattacatcaattacttgtaagagtaactgattcattatttatggcgccaagtccaactccagtaaaaacagcgttacaaatggttggattagatgtaggttctgtacgtttaccacttcttccattaacagaagaagaaagagtaacgttacaatctgtaatgcaatctatccctcgttaataaaaaatgacctagtgtagaactaggtcattttttattatatgcaaatctttttctcgttttctcacctatatgtgttcttataagaatattaatcgcttcttcattatgtgtataagaaaataatcgtactcctttaaccgagtcaaaaaatgatagatattatggaataaacgtaataaactacggtgtttgtttttagagaaatcccctcaaatttgacgtaattcataaaaaaactccattttgtaagtgtttttgttggattctagaaaaataaatcttgaaactccctattatgaaatgaatttagcatatgtatggctagttcttcaaaataatatggagtataaaatcgaagtaaatataaaggaaataccttcgatacttttgttgtcattccgttcttttactctttctttcgcacgatttaacttgtgttctatttcttgtatcaggtataatatggctaagtagcttagtacgggtatgcttagcaaaattgggaaaaattataatttaattaaattttcatatcatatcgaataagatatttgatttatataatgaaagagaggtgaaacctggtttaaaaaataaacaaggacatgatatcgcataacggtaaggacattcgtcttggacggtgaaaatatggtggttgtagagtttcccctggtgtctctgcaattttagtgaaatcagtgtttgcaagatttttaaaccaggcaacaacatgaagagaaaagagaatgagtctgttaaagtatttgctcttggtggagtaggtgaaatcgggaaaaacatgtactgtgttgaaattgattctgaaatctttatcgtagatgcagggttaatgttcccgggagatgaaatgtttggaattgatatcgttattcctgatattacatatttagtggaaaatcaagagcgagtaaaaggtttatttattactcacggtcatgaagatcatattggtggaattgtgtatgtacttcgtaaattatctattccagtctatgcaacgaaattaacagtaggacttatacaagaaaaacttggtgaagcgggcatgttaggccgtgtagacctaaaaacaatcgattcaaattcaacagtagaatttaacactacaacggtgtcattcttcggaacgacacatagtattccggattctgttggcgtttgtttccatacatcaaaaggtgcagtcgtatatacgggagactttaaattcgatcaaactccaattggaaatagtggagcagaccttgggaaaatggcgcaaatcggaaatgaaggcgtactttgcttattatctgatagtacaaacgcagagcgcccaggttatacaggttcagaaaaagaagttggtgtagaaatctctaaagtgttctatggcgcagaaggtcgtattatcgttgcttcatttgcatcaaatgtacatcgtattcaacaagtatttgatgcagctgctgaaacagggcgaaaagtagcggtagtaggacgtagtatggtgaaagtagtagacattgcaagacgtcttggttatttagatgttccagaaggtatggttatttcattacaagaagtagacaacttcccagagaaaaaggtagctattttaacgacaggtagtcaaggtgaaccgatggctgctctatctagaatggcaaaacaagcacataaacaaatttcaattcgtaaaggtgatactgttatcattgctgcttcgccaattccgggtaatgaaatatctgtatcaaaaattattgatttgttatttagagctggagctgaagttgtttattacggcgaaagaaaagttcacgtgtcaggtcacggtagccaagaagaattaaaattaatgttaaatttaatgaaaccaaagtactttgtacccgtacatggtgagttccgtatgcaaaaagcgcatgcatatttagctgaagatgtaggtattacaagagaaaatatctttatcgtagaaaaaggcgatgtaattgcttttggtgacgatgaagcgaacttagtcggtaaagtacaagctggtaatgttttaattgatggattaggtgtaggtgacgttggtaatatcgttcttcgagatagaaagatgttatctcaagatggaatactagtagttgttgtaacgcttggtaaagatgaaaagaaaattatctctggtccagaaatcatttcacgtggtttcgtatatgttcgtgaatcagaagcgttaattgaacgttctacagagattgtacgtatgattgttgagcagtcaattaaagaatattcaattgaatggtcaatgttaaaacaaaatattcgtgaattattagggcagttcttgtacgaagagacaaagagaaaacctatgattttaccgattattatggaagtataaaaaagatcacccttatgggtgatcttttttctttttaaccctatcgaatgaaatttataacttaagaaataatagttatatacgagtgaaaggggatgcgaaatgacagaacgtgatcgatatacaaatgaagaaaaagaagctgagccaaaagaagctggaaaagaggcttcgatagtcgaaaaaattcaacagcttggacagacaaatgtaccacagatgaatgaatcacgtattcattgtttaacgattatcggacaagtggaaggtcatgttcaattaccaccgcaaaataaaacaacaaaatacgagcatatcattccgcaaattgttgcgattgaacaaaatccgaaaattgaaggtttgcttttaatattaaatacggttggaggtgacgttgaagctgggctagcaatttctgaaatggtagcttcactttcaaaaccaacagtatctctagttttaggtgggggacattccatcggtgtaccgattgctgtttctactgactattcgtttattgcggaaactgcgacgatgacaattcatccaattcgtttaacaggtcttgtcataggtgtgccacaaacatttgagtatttggataagatgcaagaaagagtcattcgttttgtgacgaagcactcgaaagtaacagaagatcgttttaaagagcttatgtttgcgaaaggaaatttaacgcgagatattgggacgaatgtaattggtggggatgcagtaaagtacggtcttatagatgatgtcggcggtattggaaatgcaattcgaaaattaaacgaattaatagatgttcgtgcggaagatagtacagaagggacaatgctacaatgattttatatacaattatgccagagcaacttgtgtatccggccgattattcacaatgtgaaagtcaaaaagttgtaaatataaatggtgtggaattaatggtttctgaagaggaacatggatgttattctattgtacgtgtgctaagtacggacccacttcactatttagagtttgagcccggtcagaaaataaccttttagcaaaaagaaggattttgtttagaagctatggtataatataaaaaacaagacggttgagcagccatgagtaggctgctttcttctgtttatttagcattttacaagaagtgtaaaaatagaagatataaagacctgaaaaatagagaaaacagacatataaatagagcattttgaggggagctttatttatatgtagaacgcgaggtgaagaaatggcaaaacaaaagcaaagagggacgaaggcaaaggcaaggcgtacgataaagccaactttgtattatgaaattgtcggtttaactctttttgcactttcaatcattacgattttacagctaggcgttgtaggaaaatcgtttgtgttattttttcgcttcttctttggtgagtggtacataattggtgtgttaggtgtaatagctttatcggtttcctttgttataaaacgcggatggccgaaccttttaaataaacgattaattggattttatttaattgtattggcgatattaatgtttagtcatattacattatttaaccttcttacaaaagatggagcagtgcaaaatacttctgttattgtgagtacgaaagataacttctttcttgaaatgaaaaaggggccagatagcgttcatttaggtggtggtatgtttggtgcgcttatgttcgcaacatgttacttcttatttgacgaagtaggagcttatatcattggtattattctagttattctcggtatactttgtataacaaataagcatattggagaagtgttagcgccagttggtagaattcttagaagtcaatttcaagtgatgcaaggggattataaagattggagagctaaaagaacggctgaacaaacagaaaagaaaaaaacaacaagaagcacaagaagcaaacgtgctgcagaacaagaagaaattattgagccgatggaagaaatctcaattgatcctccgattatttcgaatttcactgagaattatcctgtaaatgaagaagaggataaacgaattgaagtagagcaagaagatttgattacttcaccgtttattgaagagactccgccaattgaagagccaaagaaaaagcgtggagaaaaaattgttgaatcgttagagagtgaagcgcaagcacctcctatgcaattttccaatgtagaaaataaagattacaagcttccttcacttgatatattaaaatttccaaagaataagcaagttacaaatgaaaatgcggaaatttatgagaatgctcgtaaattagaacgtacattccaaagtttcggagtgaaagcgaaagtaacaaaagtacatagaggtcctgcagttacaaaatatgaagtgtatcctgatatgggggtaaaggtaagcaaaattgtcagtttaagtgatgatttagcccttgctttagctgccaaggacattcgtattgaagcgccaattcccgggaaatcagctgtagggatcgaagttccgaactcagaagtttcgatggtaacgctgagggaagttcttgattctaaggctaataatcatccggaagagaagttgttaattggtcttggtcgagatattacaggtgaagctgtactagcccgtttaaataaaatgccccatttactcgtagctggtgcgacaggtagcgggaaaagtgtatgtattaacggtattattgttagtattttaatgcgtgcaaaaccacatgaagtaaaattaatgatgattgacccgaaaatggtagagttaaatgtatataatggtgtgcctcatttgttaacgccagttgtaactgatccgaagaaagcatcgcaagcattgaaaaaagttgtgagtgaaatggaacgtcgttatgaattgtttgctcatagtggtacacgtaacattgaaggatacaacgattatataaaagagcataatagtcaatcagaagcgaaacaacccgaattaccttatattgtagtaattgtggacgagttagcagatttaatgatggttgcttcgtctgatgtagaagatgcgattatgcgtctagcacaaatggctcgtgctgctggtattcatttaattattgcaacgcaacgtccgtcagttgacgttattacgggtgttattaaagcaaatattccatcacgtattgcattcgctgtatcttctcaaacagattctcgtacaattcttgacggtggtggtgcagagaagctattaggtcgtggagacatgctgtttataccaattggtgcatcgaaacctgtacgtgtacaaggtgcatttttatcagatgatgaagttgagagagttgtagaatatgttattggacagcaaaaagcacaatatcaagaagatatgattccgcaagatgttcctgatacgaagcaggaagtagaagatgaattatatgatgaagcggttcaacttgtagtggaaatgcaaacagcatctgtttctatgttacaacgtaggtttagagtaggttatacgcgagctgctcgcctaattgatgcaatggaaatgaatggtgtagtaggtccgtatgaaggtagtaaaccgagagaagtgctcattaatgatgtacaagaaaaaagttcttaaaaaaagcctaattgtttttacaattaggcttttttatatagtgtttttgttatatactatactcagcaataaagaaagggcttacatttaggggtgctctttagaatacgaatactttgattatgttttatgtaaatgttcgatatttaatgcagaaaaatgttggattttgttgacacgtatgagagcaagtggtaagattacttcgaaaagaatcactgcctcatataatcttggagataaggtccataagtttctacctggcaaccatgaattgctagactatgaggggaaaagtgtgtaacaaaggatgtaaaggatctttgtgccgaactttttctcgaaatgaggaatgtttatggtgcaaagttttttttatgcaataaagagtgaaaatttcattaaaaaaaattattattatttattcgacaattacgcttattttggtgtttagtcatttgtactatgttgtaagttgaaaaaagagaaaagaagtcttacatcagaggtcgaataattgaaatgcgggggagtcttatgtcagtaaaatccgatagtcgtcacctatatctacgggtgattgatcacatcaaagaaaaaattaaagatggggcttataaagaacgacaaaagttaccatcagagtttgatttagcgaaagaacttggcgtaagtagagcgactttaagggaagcgttgcgtattttagaagaagaaaatgttgtcattcgtagacatggtgtagggacatttgtaaatgcaaagccattattttcttctggaatagaacaactttctagtattacagatatgatttctagtgtggggaaaacaccaggaacaatctttttatcatcatctactacaactttaacagaagaggaaaaagagaagtttaatagtgaagatggttttaatgcagtgatgattgaacgcgtgcgtacagcagatggggaacctgttgtgtattgtatcgataaacttgcaaaagaaatattgccagatttatcgggttacaatgaggaatcattattaacggtgatacataataacacacataagcgcataacatatgcggttgcccacattgagccaattggctatcaccctaaaatctcaccgattttagaatgtgagcctgaaacagcactgcttgtattaaaacaaatgcactatgatcaaaatgatgagccaatcttatattctatcaattactttagagctgataaatttagcttccacgtattaagaaagcgtatgtaggtaaattcctttttagggaggtgacagcaagaagtaaggaacagcagcgtaagaataaataaatatatatcatttttggaggggtttctagtatgaagaaaaaagcaggccttttattatcattaacattagcagcaagtacagttttaggtgcatgtggtaactcggataaggcgagcagtgacaagaaagacacgaaagacaataaagacttcaaggttggtcttgtaacggatgttgggggcgttgatgataagtcattcaaccaatcttcttgggaagggttacaaaagtttggtaaagataatggtttaaaagaaaagacaaattatcgttaccttcagtctgaaaaagaggctgattatattccgaatttaaaaaaattctcgaaagataaatatgatttaacattcggaattggttataaattagagggtgcaattaaagaagtagcaaaagaatcgtcaaaacaacaatttgcaatcgtagatactgttgtagatgcaccgaacgtaacgagcattacgtttaaagatcatgaaggatcattccttgtaggtgcggtagcagctatgtcaacaaaatcgaataaagtaggatttgttggtggaatgaaaagtgatttaattagtaaatttgaaaatggatttaaagctggtgcaaaggcagtaaatccaaacattgaaatcgtatctgaatatgcagaagcattcgataagcctgaaaaaggtacagttcttgcttcagcaatgtatggtcaaggcgtagacgtaatttatcatgctgctggtggtacaggtaacggtgtgttcacagaagcgaaaaaccgtaagaaaaaaggtgaaaatgtttgggtaatcggtgttgaccgtgaccaacatcaagaaggtatgcctgaaaatgtaacattaacttcaatgattaaacgtgttgatgtagcagtagaaaaagtagctaaagaagcaaaagatgggaatttaaaaggtgggaaaattgaagagtttggcttaaaagatgacggtattggtatttcaaaaacaactgataacgtgaaaaaagttaaccctgaaattttaacaaaagtagaagagcttgaaaagaaaattacagccggtgaaattaaagtgccagctacagataaagagtataaagaatacgaagcttctctaaaaaaataaatagagaaatagcaaaggttagttcatagaactaacctttgtatgtataaaacttccgaattgcttaataagttaatagtgtaatagggaatgttccctgttaaaaggaggaacacaatggaatacgtaattgagatgaataacattacgaaagtattcccaggcattgtagcgaatgatgatattacgctgcaagtaaagcagggtgagatacatgctttacttggagaaaatggtgcagggaaatccacattgatgaatgtactatttggtttgtaccaaccagagcagggtgaaattaaaattaaaggtaaacctgtaaaaattacaaatccgaatatagcaaatgaccttggtattggaatggtccatcaacactttatgcttgttcataattttacagttacagagaatattattctcggaaatgaaccgaagaaaaaagggaaaattgctgttgaggatgctgctaaagaaattcaaaaactgtctgaacaatacggtttggctgtagatccatatgcgaaaatacaggatatttcagttggtatgcaacagcgtgtggagattttgaaaactctttaccgcggtgcagaaattttaatatttgatgaaccgacagctgtgttaacaccacaagaaattcatgagctaattcaaattatgaaaaagcttgtacaagaaggaaaatctattgttcttattacacataagttgaaagaaattatggaagtttgcgatcgttgtacgattattcgtaaaggaaaagggattggaacggttgacgttgcaaatacggatgaaaataaacttgcagaattaatggtcggacgtcaagtgaattttaaaacagaaaaaatagacgcgaagccaaaagaagatgtactttcaattgcaaaccttgttgttcacgatgcacgtcaactacctgctgtaaaaggccttgacttaactgttcgtgcgggggaaattgttgggattgcagggattgatggaaacggacaaagtgaattaatagaagcgattactggtttacgaaaagttgagtcaggttctattgcaattaaaggaaaagaaataacaaattggcctgttagaagaataacagaagaaggaattggtcatattccagaagatcgtcataaacacggactcgttcttgatttttctgttagagataatatagttcttcaaacgtactataaaaatccgttttcaaagaaagggattttaaattttagcaaaattacagaaaaagcaaaggctcttattgaacagtttgatgtacgtacacctagtgagcaaacgttagcacgcgctctatctggggggaatcaacaaaaagcaattattgcacgtgaagtagaccgaaatccagatttattaattgcggcacagccaacacgtggtttagatgtaggagcaattgaatttattcataagagattaatagagcaaagggataaaggaaaaggtgtattacttttatcattagagttagatgaaatcttaaatgttagcgatcgaattgctgttatttatgaaggggaaattgtagcaatagttgatgcgaaagaaacgaatgaacaacagcttggattgttaatggctggaggaacaaagaaggagcaggtgggtacaaatggctaaaaaacttttaacagaacgaacgataaatattttagtcccagtactatccgttattttcggcttacttgtaggagcgattgtaatgctagttagtggctatgatccaattgttggttatagtgcactttggacaggaatgttcggcagcgcaagtgcgattggtgaaacgctccgtacaatgataccgcttattcttgctggcttatcggtcgcgtttgcatttcgtacaggtttatttaatatcggggtagagggtcaattgttagttggttggcttgcagcggtttggttcggttatgcagtctcactaccagcgttccttcatattccattatcgattttatttgccgcattggtgggcggaatttggggcttcattccgggatatttaaaagggaagtttcaagtgaatgaagttattgtaactattatgatgaactatattgcgttgtatgtaacgtatgacatcattaagcgtttcttacatgcgggtaatgacaaaacgtatgatattaaagagagtgcgtcactatcttcagactggcttgcttctattactgacggttcacgtctacactggggaattattgtagcaattttaatcgctattttaatgtggttcttattagatcgaacaactttaggttacgaattaaagtctgtaggatttaatcagcatgcttctcaatatgcaggtatgaaagtttctcgtaatgtagtattctctatgacaattgctggtgcatttgcggggattggtggagcgatggaaggattagggacattccagagtatgacagcgatgtcttcgtttacaggagtaggatttgatgggattgccgtagcattacttggagggaataatccgtttggtataatcctttcagctttattatttggtggtttgaaaagtgcttcccctcaaatgaactttgaggcagatgtaccgtcagagcttattaatgtaattattgcatgtatcatcttctttgttgcatgtagttatgtgttaagatgggcgcttacacgcatgagcaaggaggggaaataaatgagctttttagatatattagccattcttgtgacgggtacgttatatacatcggcacctatcattttcacagcactaggtggtgtatttagtgaacgatcgggtgttgtaaatatcggattagaaggactaatgctatttggtgcatttattggagttgttacaaacttattaatgggtgatacttggggaacgatgactccatggattgcgttattatttgcggcaattggtagtgggttatttgcattacttcatgcggtagcttctattacattccgagcagatcaagttgtaagtggtgtagccattaacttcttatctcttggtttaacagtatttgcaattaagaagatttttgataaagggcagactgactttattcagtatcgtattgaaaagattgatattccaggcctttcggatattccggttttagggaaaatatttttctcgaacgtaccaataacgtcgtatattgccattattttagcattcgttgtttggtatgttatttataaaacaccgttcggtcttcgtctacgtgctgttggtgaacacccaatggcagcggatacgatggggattaatgtatataaaatgcgttatattggagtctgtatttcaggagtgtttgctggaatcggtggagcgatttttgcaatgtcaatttctaataacttctcaggggcaactattacaggacaaggtttcttagctttagctgctatgatttttgggaagtggaatccactaggcgcattaggtgcagctctattctttggttttgcgcaatctctaagtgtaacgggcggaacaattcctgtattagatcaaattccaagtgttttattaacgatattaccatatgtattcacaatattagcgcttgttggttttgtaggtcgttctgaagctccgaaagcattaggaactccttatgaaaaaggaaaacgataagtattttataagtataaaaaagctcgcacattagtgtgggcttttttacatagaatatatttaatacggaattttactatgttccttacatattaaagtttttagaaagaatcatatgtaagcataataagggagaaaagttgattttttatttctaaaaactgtatattgaagaggaatattcctatatacgtaaaggagggctataaatgaaactaatggaacaacaactacatgagttagatggtttgcgcgtacatattattccgactgataaatataaaacgaatacctttgtatttcgttttaaagcgcctttaaatgaggagacggtgacagagcgtgccttattgccatacgtattgcaaagtgcgacagaaaaattaccttctgtaattcgtcttcgtcaatatttagaagaattatacggatcttctttagcggtagatgtaagtaaaaaaggggaagaccatattatctccatttatgtagacattgcaaatgaagtttacttacatgatgcaccaccgttatttgaaaaagcgctttctatgttgtcagatattgtgttacatccagcaacggagggcaacggtttcctatcttctatcgtagaaagtgaaaaaagagcactgttacagagaattgaagccacttatgacgataaaatgcgttatgcaaacgagcgtttaattgaagaaatgtgcaaagtagaaccgtatcgtttaagtgcaaatggaaaaaaagagagtgttatgtctattacaaatgaaagtctgtatcaatattatcaaaaggtgttagcggaagatgaaatggatctatatattattggtgatatttcagaaaacgccgttgatcttgtaagtaagtatttttctatttcagctcgtccagtgagagaaagaaatgtactccttcatagacgaaataatgaagaaaaagaagttgttgaaaaacaagaattaaaacaaagtaaattacacatcggttatcgtacatttgtcacatataaagatgaagattattttgcattgcaattgttcaatggattgtttggtggcttttctcattcgaagttattcgtaaatgtgcgtgaaaaaaatagtttagcgtactatgcagcatcgcgctttgaaagtcataaaggtttattatttgttatgtcaggaattgaagcgaaaaattatgaaaaagcagttgagattattaaagaacaaatgcttgcgatgcaaaacggagagttttctgaagaagaaatacatcaaacaaaaagtgtcatccaaaatcaaatattagaggcaattgatacaccacgtggctttgtagaaatgctatatcatggtattatttcagatcgtacacgtccagttgaagaatggcttacaggtatagaaagtgtgacaaaagaagaaattgtaaaagttgctaaaaatattgaactagatacaatttactttttacaaggaacggagggagagtaagtggagaaaattgtttatgagcaattaaaagaaacactctattatgaaaaacttcctaatggattagatgtatatgttttaccgaaacaaggatttaataaaacatttgcaacgtttacgacgaaatatggttctgtagataatacatttgtaccattagggaaagaagaaatgattcgtgtgccagatgggattgcacattttcttgagcataaattatttgaaaaagaagatcatgatgctttccaattgtttagtaaacaaggagcatcggcaaatgcttttacatccttcacacgaacagcttaccttttttcaggtacttcaaacgtagaacaaaatttaaatacattgctaaacttcgtacaagagccctatttctctgaaaaaacggttgaaaaagagaaggggattattgggcaagaaattcaaatgtatcaagataacccagattggcgtttgtactttgggttaattgatagcttatttgtaaaacacccaattaaaattgatattgcggggacaatcgaatctattagtaaaattacgaaagatttattatatgaatgttatgaaacattttatcatccgagcaatatgttattatttgttgtgggtgcaattgatccagagaaaacaatggatttagtacgtgaaaatcaagcgaaaaaagattataaaaaccagccagaaattgtgcgttcatttgaagaagaaccaaatgaggtaaatgaaaagaaaaaaattatttcaatgcctgtgcaaacaccgaaatgtttagttggtattaaagcgactaatttaaaagaaaaggggcaagcgcttttaaaacaagaaattgcgcttacgttacttttagattatttatttggaaaaagttctgttcattacgaagctttatataatgaaggacttattgatgattcattctcgtatgactatacagaagaaaataacttcggttttgcaatggttggtggtgatacgaaacaacctgatgcattggcagatcgtttaaaagatattttattaaaaacagattatgatcaattagatgcggcggcattagaacgagtgaagaaaaagaaaattggtggttttttacgctcgttaaattcaccagaatatattgcaaatcaatttacacgatacgcgtttaatgaatctagcctatttgatgcattgactgtattagaaggactaaccgttcaagacttacaagaagtagcgggattattgttatcagaagaaaaaatgagtgtttgtcaggtgttaccgaaaaaataaaattttaaagataccctcatcttatcattgaaaaattgtaagatgagggtattatttagttgtgtgaaaattgaacttgtagagataagagagggaatttatgaaaaagtatgcgttagtaactggagggagcggagggattggctctgctatttcgaaacaattaattcaagatggatatacagtttatgttcattacaataacagtgaagaaaaggtattggaattgcagaaggcatggggagaagttatccctgttcaagctaatttagcttctagtgatggagcagaacgattgtggggacaaattgaacatcctattgatgttattgtatacgcagctgggaagagtatttttggactagtaacagatgtaacaaacgatgaattggattatatggtagaacttcaagtgaagaacgtatataaattactttctatggcacttccgcctatgatcgggagaagaagtggtaatattgtaattgtttcatctatatggggacaaataggggcttcttgtgaagtactttattcaatggtaaaaggggcgcaaaattcatatgtgaaagctttagcgaaagaagtttctttaagtggattacgtgtgaatgcagtagcaccaggagcaattgaaacggaaatgttaagtgttttttctgaagaagataaaatgggaattgctgaagatataccattaggtagaataggattaccagaagaagtagcgaaaacagtttcatttctcgtatcaccaggagcgtcttacataactggacaaattatcggagtgaatggcggttggcactgctaaaaaattcttacataaaaaatgaatagttgcacaaattaaggatgattttattactcaatagtgaggtgcttaattatgtcagtattagataattttgatcagtggaagagctttttaggagaacgtttagagcaagcgcaagacaaaggtttagatggcggtgcggtatcagatatggcatttcgagttggcgactatcttgctaatgaagtagaaggacgcaatgaccaagagaaattattagctgagctttggaaagttgctgatgaacaggagcaacatacaattgcaaatttaatggttaagttcgtacaacataagtaaaagtagagaggagattctcctctctactttttttgtataataattacacaggatagattatacatttagcttccctattagggtgaaatcatataatatagtacgtaggtgtaaagtaagcaaggggagtgatcttggatgattgaatggtattttgaatatgaaatacataaaaaccgacctggcttgcttggtgacgtttcttcgttaatcggtatgctcggcattaatattgtcacaattaatggtgtagataatgcacgacgtgggttacttcttatgtgtgataatcaagagcaaatctctagacttgaatcaattttaaatacgatggataacataacggtaacgaaatatcgtccgcccaagctaagagataagctagcggttaggcatggtaggtacatacaacgagatgcagatgataagaaaacatttcgatttgtgcgtgatgaattaggcttacttgtagactttatggcagaaatcatgaaaaaagaaggccataaactaattgggatacgcggaatgcctcgtgtcggaaaaacagaatccattgttgctgcaagtgtttgtgcaaataaaaggtggttatttgtatcatctactcttattaagcaaactgttcgcagtcaattaattgaagatgagtatagcgatgacaatattttcatcctagatggaattgtgtcaacgaagcgtgctaacgaaagacattggcagctcgttcgtgaaattatgagattgcctgcaacgaaagttgtggaacatcctgatgtatttgtgagtcagtcagaatacacattggatgattttgattatattatcgagttgcgtaacgattatgatgaagaaatacaatataatttagtagatgaaattgagcaaggtacgcaaaataatttctctatgtttgacttttaaagaaatattgaggtgttagtagtgacggaattgggacaaaagctgaaagaaacaagagaagcgaaaggcttgtctattgatcagctgcatgagattacaaaaattcaaaaacgccatttagtggcaattgaagaaggcaattatgatgtattgccaggagctttttatgcgcgtgcattcattaaacaatacgcagatgcggttggattaaatggagaggaactgcttgtagaacatcagagtacgataccacaatctgaaaagcgtgaagttccacaagtatcaacgggacaaaaaacacaagaaacaatgcaaaaatcttcatcatggccaattgcagatcacatgccgaaaatcttagttgcgctgttagtcatcgcagttggagtggtaatctggtttgtgtttcaagcgttaactggaaaagatgatgaaaaagttccaagcgctcaaagtgagaaaattgaagttcaaaaagcgaaagattctccgttagatacgaagaaagatgaagtgaaagcggaagagccaaaaaaagaggaaccaaagaaagaagaaccaaagaaagaggagcaaccagcacaaccaactggacagcaagaagtgaaagtagttggaacaactggaaaggtatctactttggaaattcataataataaaacattagaactggaaatttcagctaagggtacaagttatgtagatgttaaggatgatgcgggtaacgaaattctaaacactacagtacaaagcggtcaaacagagaaacgcgatgtatcaacattaaaagaagtacgacttaatattggaagtgcaccgaatgttgaaattaaactgaatggccaagtgcttgctttcccgttagatccacaaaaagaatatcaccaaagattggtgattaaaaaccaagggatagagcaaccagcacaataacagtcatcgcttcgatgactttttttcgatgaacaaatgtttttgatatgatggaggaatagctgtgaatttaccaaataaaattacaatatctagaatcttcttaattccaatttttatggtaattatgttagcgccctttgattggggttcatacaaaattggtgatgttgatttgccaattcaacatttagtgggggcacttatctttatcattgcttcagctacagattggattgatggacattacgcaagaaagtataatcttgtaacgaatttagggaagtttcttgacccgttagctgataaattgcttgtttcggcagcacttattacattggtagagatgcaatatgtaccggcttggattgttattgtaattatcagtcgtgagtttgcggtaacaggtttacgtcttgtacttgctggaacaggggaagtagttgcagcaaaccagctaggaaaaattaagacgtggacacaaattattgcaattgcagcatatttattacacgatgtacctttaaatttaatccatattccagttgcagatatcttcatatggattgcattaatctttactgttatttcaggatgggattatttctggaaaaatagagctgcttttgtaaactcaaaatagaagtttatgggggaattgggatgaatgctgagattattgcggttggaactgaattattacttggacaaattgcaaatacaaatgcccagtttttatctgaaaagttagcttcaatcggaattaacgtgtactatcatactgttgttggtgataataataagcgattgcaaaaggcgattgaagctgcggaagaacgtgctgatatacttatttttacaggtggattaggaccaacaaaagatgatttaacgaaagaaacgatagctgctagtttagatgaagagcttgtgtatgatgaaaaggcattagccttaataagtaattactttaagcgtacaggccgtgaatttacggagaataataaaaagcaagcgctcgttttaaatggagcaacagtatttgcaaatgaccacggtatggcgcctggtatgggggtaaataagaacggaaaagtttatattttattaccagggccgccaaaagaaatgaaaccaatgtatgtaagttacgtagagccttttttacgtaattttacaacaggagaaaacatttattctcgtgtgcttcgtttcttcggtattggggagtcccaattagaggtgaaagtgcaagatttaattgatggacaaacaaacccaacaatcgccccgttagcaaatgatggagaagtgacattacgtttaaccgctaagcatcaaaatgttagcgaagcggagaaattaattcaacatgtggaagatttgattttagaaagagtaggagaatttttctacggatatgaccaagaatttttgcattataaggcaatcgagttattgaagagaaaagggttaactttagcgtgtgcagaaagtttaacaggtggtctttttggaaatcaagtaactgaaaacgctggtgtttcttctgtatttaaaggcggtgtcatttgttatcataatgatgtgaagcaacatgttttacgtgtgcctgaagaagtgttgcatactgatggtgcagttagtaaagaatgtgctcgttatcttgctgaaaatgttaaggatgtattaaaagcggatatcggaattagtttcactggggtagcagggccagatgcttcagaacagaaagaaccaggaacagtatttgttgggctttcgattaaggatgaaccaactgtagtctttcctcttaatttaagcggaagtcgtcaacaaattagagaacgaacagcaaaatatggattttatcatttatataaaaagctagaagagatataagtttcttctagttttttttacggttaaatttagatattatttgatagaaaataaaaaaatcgaataaatgttcgatttttgttggcaaattgaattgaaaataggtataataagattagcaattcagttaaggaggaattttgaatgagtgatcgtcaagcagcgttagatatggcgttaaaacaaatagagaagcaattcggtaaaggttcaattatgaaattaggagaacaagcggagcgtagagtttctacggtttctagtggttctttagcacttgatgtggcactaggagtaggcggatatccacgtggccgtattatcgaaatttacggacctgaaagttcaggtaaaacgacagtttcattacatgcaattgcagaagtacaacgtcaaggtggacaagcagcattcattgatgcggagcacgcaatggatcctgtatatgcacaaaaattaggcgttaacatagatgaattactattatcacagcctgatacaggggagcaaggattggaaatcgcggaagcacttgtacgaagtggtgcggttgacattatcgtaattgactctgtagcagctcttgtaccgaaagcagagattgaaggcgatatgggtgactcacacgtaggtttacaagcacgtttaatgtcacaagcacttcgtaagctttcaggagcaatcaacaaatcaaaaacaattgcaatctttattaaccaaattcgtgaaaaagttggggttatgttcggaaacccagaaacaactccaggtggtcgtgcgttgaaattctattcaactgttcgtcttgaagtgcgtcgtgcggagcaattaaagcaaggtaacgacattgttggtaataaaacaaaagtaaaagtagtgaaaaataaagtagcaccaccattccgtgttgcggaagttgatattatgtacggagaaggtatttcaagagaaggtgaaatcttggatatggcttctgagcttgatattgttcaaaagagcggtgcctggtattcttataatgaagaacgcctaggacaaggtcgtgaaaattcgaagcagttcttaaaagaaaatacagatttaagagaagaaattgccttctttattcgtgagcatcacggaattagtgaagattctggtgctgagggcgcagaagattcaactcttcttgattaaaaaaataaaagacacggtctcgtgtcttttatttttttatctactattaaggagcgtaatactatagataaaaatattttttgacttcaaatgggttgtgtaaagaaggatatttaaatattttaagtaaagaaatgggaattactaaggttttccagtataataggctccttactttttaaatttaggtcacattcaaggctgaaggtaaagaaagtaaaagtagacaacgcttgacaatgaaaattacgatagatacaatgagaatgtatattttttcttatatacgatatactcttctcaagaagagaagtaatattcggagtaaggtttaaatcttaccgaaataataatatgacattttaattgtgaaatgaagaaagtcccttaaaaaaagcgggacgacggtctttgctgtatgttgtaattcaatgtacatgccgacagtcttttttcattcatagcaaggggaggtgaaatcatgagtagtacagtttggatactcatctccattttgcttgcaacaacagtcggtgcagttgttggcttttttgttcgaaagtctattgctgaagcgaagattaatggtgcggctaatgaagcgaaacgtattctagacgaagcgaatcgtgaggctgaagcacttaagaaagaagcgcttttagaagcaaaggatgaaattcatacacttcgtacagaagctgaattagaaattcgtgaccgtagaagcgaattacaaaaacaagaaaatcgtttaatgcaaaaagaagagaaccttgatcgtaaagacgaaacgctcgataaacgcgagcagcagttagagaagaaagaggattctcttgtagcgagacaacaacagattgaagagttggaaagcaaagtgggagagttagttcaaaagcaacaaacggaattagagcgcatttccaatctgacacgcgaacaagcgaaagcaattattcttggtaaagtagaaaatgaagtttctcatgaaatcgctgttatggtaaaagaaagtgaagttcgcgcgaaagaagaagcggataagaaagcaaaagagattttatctcttgcaatgcaaagatgtgcagctgatcatgttgctgaaacaaccgtttcggttgtaaatcttccaaatgacgaaatgaagggacgtattatcgggcgtgaaggtcgtaatattcgtacgttagaaacgttaacgggtattgacttaattatcgatgatacaccagaggcggtaatcctttctggattcgacccaattcgtcgtgaaacagctcgtatcgctcttgataaactagtacaggacggacgtattcacccagcgcgtattgaagagatggtcgaaaaatcaagacgtgaagtggacgagtatattcgcgaagtaggagagcaaacaacgtttgaagtgggtgttcatggattacatccagatttaattaaaattttaggtcgtttaaaataccgtacaagttatggtcaaaacgtcttaaaacactctatggaagttgcatatttaactggacttatggcggcagagcttggcgaggatgaaaaactagcaagacgtgcaggtctattacatgatatcggaaaagcgattgaccatgaagtagaaggaagccacgttgaaattggtgttgaacttgcaacgaaatataaagagcatcctgtagttataaacagtatcgcatctcaccatggtgacacagaaccaacttctatcattgcagttttagttgcagcagcagatgctttatcagctgcaagaccgggagctcgtagtgaaacacttgaaaactatattcgtcgtcttgaaaagttagaagagatttcagagtcttatgaaggcgttgaaaaatcatttgcaattcaagcaggacgtgaagttcgtattttggtaaaaccagatacaatcgatgacttagaagctcatcgtttagctcgtgatatccgaaaacgtattgaaaatgaactggattacccaggacatattaaagtaactgttattcgtgaaacacgtgcagtggaatacgcaaaataaagtggtgaaacaccactttatttttttgtgttggaattggataaaataaagacagttagttatatagcataaaagtgaagcaaacttataataaagatattataaggaatttacttgatgctatagcaataaaaaatgcagtacatagaaagggtaagacatatgagaatattatttgttggggatgtagtaggatctcctggtagaggtatgattcaacaatacgtaccggcattaaagaaaaaatatacacctacagtaacaatcattaatggagaaaatgcagcaggtggccgtgggattacagaaaaaatatatcgaaactttttagagtgtggggcgcaggcagttacacttggaaaccacgcttgggataatcgtgaagtatttgaattcatcgatgatgcaaaatatcttgcaagaccagctaacttcccagaaggaactccaggaaaaggacttatctttgtgaactgtaatggaacagaagttgcagttattaatttacaaggacgtactttccttcctccaattgattgtccattccgtaaagtggatgaattaattaatattgcgaaaaaacgtacgaatattatatttgttgatttccatgcggagactacaagtgaaaaacaagcgctaggttggtatgtagatggacgtgctacagcagtagtaggtacgcatacgcatgtccctacagcggataaccgtattttaccaagcggaacggcatacattacagatgttgggatgacagggccgtatgacggaatattaggtatggacagagaagcagtattgaagaagtttttaacaaacttaccagtacgatttgaagtaacaaatggcagaacgcaattaagtgcagtgttaattgatgtggatccaaatacaggaaaagcaaagagaattgaacgtattttaattaatgacgatcaaccattttttgagtaaatttccgtcaaattttagataagttattatattttaattttttagaaaaattacgaaaatttagcaggaatacgcgccattcctcgtgaatataagttaaagtgaaataattgctaatactttttaaagaaacgaggaggaaacgcggaatggaaatattaaaagttaaagcaacgtcggtccctaattctgtagctggtgcacttgcaggtgttattcgcgaacgcggaacagcagaaattcaagctattggtgctggtgcattgaaccaagctgtaaaggcagtagcaatcgcaagaggatttgtagcgcctagtggtttggacctgatttgtatcccagcgtttacagatattatgattgatggcgaagagcgtacagcaataaaattaattgtagaacctcgttaagtttaaacaacctgtttgcagtatgcaaacaggttgtttttataatggaggaatgaaaatgaaaatttttgatgctcattgtgacgtgcttcttcagttatggagtgcacaagggaaaaggaattttaaagatgattcacaattacatattacatttgaacagttaaagagaagaaaaggaagtatacaatgttttgctatatatgtaccagaaacagtggcatatgaaaaccgatttgaagtagcattacaaatggtagatattttttataatgaaattttatccctacaaggtgtgaagtttattcagacaaaagatgatattaacatattaaaacaggacgagattggagcgatattaacaatagaaggatgcgaaacaattggaaaagatgcaatgaaattacggttgttgtatcgcctaggagtacgttcttttggactaacatggaattatgccaatctcttagctgatggtgcgctagagacacgtggggcgggtttaacgacttttggtaaacatgttgtacaagaactgaatacgttacatgtatggactgatgtgtctcatttgaatgaaagaagtttttgggatgttatagagattgcaaaaaatcctattgcttcccactcaaattgtatgaaactttgcgagcacccacgtaatttaaacgatgaacaacttaaagctcttataaagcgaaatggcatgattggtgtcacttttgtaccgcagtttctaacaaatgaaaaacaagcgaatgtagcagatataataaaacatatcgaatatatttgcttgctaggtggagaaaacaatatagggtttggttcagattttgatgggattgtagatacagttgtaaatgtatcagcgtatcgagattatgaaaatgtaatgaatgagctttgtaaacactatgctgcatctactgtagaacgatttttatatgataattttgtagaacatatgagtttttaaattctgatttaaaattcagaaaaattaaaattaattcatttgattttattgctttttttaagacctaatactagaatgaaaaacaaaatagctttatactaaagattcagggaaatcagaagaggcataatttgcgtccgttgtagtttatttgcataaaaaatgctaaactattactgtaaaaaaatacactacaatgaatgcagccaaaaggggtgtaggagatgattagtcaactttcatggaaagttggaggccaacaaggtgaaggaattgaaagtacaggagaaatcttctgtattgcattaaaccgattaggatattacctatacggttaccgccacttctcatcacgtataaaaggcggccatacaaataataaaattcgtgtaagtacaacagaagtacgagcgatctcagatgatttagatattttaattgcttttgaccaagaaacaatcgattttaatttccacgaactacgtccaggtggaattgtagttgcggatgcgaaatttaatccaacaatacctgacaatacagatgtaaatctatatgtgataccgtttacagatattgcttcagaattaggcacatcattaatgaaaaacatggttgctgttggagcatcaagtgcagtattaggattagatgaaacagcttatttagatgttgttgaagaaatctttggtcgtaaaggagagcaagtcgttcaaaagaatatggacgcaattaaacgcggctctcaatatatgaaagaattactaggtgagaaagtaaacatgatgcagcttgaaaaagctgatggtaaaaaacgcatgtttatgattggaaacgatgcaatcgcatttggtgcggtagctggtggtgctcgttttatgtcagcatacccaatcacacctgcatcagaaattatggaatacttaattaaaaaattaccgaaagtcggcggaacagtaatccaaactgaggatgaaatcgcagcttgtacaatggcaatcggtgcaaactatgctggtgttcgtacattaacggcatctgctggtccaggtctttcattaatgatggaagcaatcggtttagcaggtattacagaaaccccattagtaattgttgatacacaacgtggcggcccaagtacaggattaccaacgaaacaagaacagtctgacttaatggcgatgatttacggtacgcatggtgaaattccaaaaatcgtaatggcgccaagtacagttgaagaagctttctatgacattgtagaagcatttaacttatctgaagaatatcaagttcctgttattttcttaacagatttacagctttcgttaggaaaacaaacagtagaaccacttaaattagataaagtagaaattcgtcgtggtaagcttgatttagaagcagaattaccagaacgtgaaaataaagcatacttcaagcgttatgaagtaacagaagacggcgtttcacctcgtgttttacctggtatgaaaaatggtgttcaccatgttacaggtgtagaacatgatgaaactggaaaaccatcggaatcagcaataaaccgtaaagatcaaatggacaaacgtttccgtaaaatggagaacttgaagtttaatacccctgtttataaaaatgttaagcatgaagaagcagacgtattgcttgttggatttaactcaactcgtggtgcgatcgaagaggcaatgacgcgtttagaacaagagggtatgaaagtaaaccatgctcatgtgcgtttaattcacccgttcccaacagctgaaatcgatccacttgtgaaaaaggcgaagcgtgttgtagtagtagaaaacaatgcaacaggtcagcttgctaacattatgaaaatgaatcttggtaatggtgagaaaatttctagtcttttaaaatatgatggaaacccattcttgccgaaagagatttacaacgaatgcaaaaaaggggttgtattaaatggcaacatttaaggactttcgtaacagtgtaaagccaaactggtgcccaggttgcggagacttctcagtgcaagctgcaattcaacgtgcggcagctaacgttggcctaaatccagatgaacttgctgttatttctggtatcggctgttcaggccgtatttcaggttatattaattcatatggtgtgcatagtattcatggtcgtgcccttccaattgcacaaggtgtgaagatggcaaatcgtgatttaacagttatcgcttcaggtggtgacggtgatggatttgcgattggtatgggtcatacaatccattctattcgtcgtaatatcgacattacgtacatcgtaatggataaccaaatttatggattaacaaaagggcaaacttcaccacgtagtgaagctggatttaaaacgaaaagcacaccacaaggttcaattgaaccatcactaaatgtaatggaaatggccttgacagctggtgcgacatttgtggcgcaaagcttttcgagtgatttaaaagaattaacacaaattattgaggctggtattaaccataaaggattttcattaattaacgtatttagcccatgtgttacttacaataaagtaaatacttacgattggtttaaagagaacttaacgaaactaagcacagtagagggatatgatccatctaatcgcatgatggctatgcaaactttaatggaaaataacggtttagtaacagggttaatttatcaaaatactaagcaaccatcatatcaagaacttgttaaaggctatagtgaagagcctttagtgaaatctgatttaaatatggatcagaaaatgtttgatgagcttgttgctgaatttatgtaatgtaagaagaggaggttgccgatttggcaacctttttttatatacaaaaatatagggtagtcttatttacttggaaaattcagaatgataaaataatatataaatcgttgtatgaaaatggcaagttcattgcttatgaaatgtaagataataaagggcctctttattgttaaaattggcgaaacacgtcgtactatggtaatgtttatagggataaagcaatatgcttttgggtaggacaacaagaaatgataaaaagggaatgtctatttgcgtggggaagacttcattcttatgaatgattagattgattactcaagtttcaaaggacaagttatctctcaagctatctaaccatttttgaggtgagtctaagcgcattaaaatggactatagagtgtgtatagttaagggtgaaaggagattaccgatgaacgagcaacaacgattagcaagtcaacaagcaaattcctctacgaaaaaagaagagaaagattatagtaaatactttgaaagtgtatatcaaccaccttccttaaaggatgcgaaaaagcgtgggaaagaagaagttaaaattgaacgggattttggcttacctgaagagtttcgcaattttggtacaggaagaaagttctatattcgtacatatggttgtcaaatgaatgagcatgatacggaagtaatggcaggtattttcacagcacttggatatgaaccaactttttcaactgaggatgcagatgtagttttattaaacacttgtgcaattcgtgaaaatgctgaaaataaggtgtttggtgagctaggccatttaaagtcactcaaacgaagaaatccagaccttttaattggtgtatgtggttgtatgtctcaagaggaatctgttgtaaataaaattatgcaaaaaaatcagcatgtagatatggtatttggaacgcataatattcatagattaccgtatattctaaaagatgcgatgttctcgaaagagacggtagttgaagtatggtcaaaagaaggtgacgtaattgaaaaccttccgaaagtacgtcgtggtgatattaaagcgtgggtaaatattatgtatggctgtgataaattctgtacgtattgtattgtaccgtatacacgcggaaaagagcgaagtagacgtccagaagatattatccaagagattcgtcatttagctgcaaatggttataaagaaattactttacttggacaaaacgtaaatgcatatggtaaagactttgaagatatagaatacggtcttggcgatttaatggacgaacttcgtaaagttgatattgcccgtattcgttttacaacgagccatccacgtgatttcgatgatcacttaattgaagtgcttggaaaaggtggcaacctagtagaacatatccatttaccagttcaatctggaagtacagatatgctgaaaattatggcacgtaaatattcgcgtgagcattatttagaacttgtaagaaaaattaaagaagcaattccagatgtagtattaacaacagatattatcgttggttttccaaatgaaacagatgagcaatttgaagaaacgatgtcgttatatcgtgaagtagggtttgatactgcctttacatttatttattctcctcgcgaaggtacaccagctgcaaaaatgaaagataatgtaccgatggaagtaaagaaagaacgtcttcagcgcttaaatacactagtaaatacgttggcaattgaaaagaatagtcgttacaaaggtcaaattgtagaagtgttagttgatggggaaagtaaaaataatccggaagtacttgcaggttatactcgtacgaataaacttgtaaacttcgtcgcttcaaaatctttaattggtcagcttgtgaaagtgaaaataacggaagcaaaaacttggtctcttaacggggaattagttgaagagccgattgaggtgaaataatagatgaaagtatattcgaaagatgacattgttgaacaagcgaaagaattagcaaaaatgatttctgaaacagaagaagttgatttttttaagaaagcagaggcgcaaattcataaaaatgaaaatgtaaagcgcgcaatcgatgaaattaaagcactgcaaaaacaagcagtaaacttgcaacattacgggaaatgggaagctttaaaaaaggtagaagctgaaattgatgcattgcaagataagttagacagtattccagtcgtacaacaatttaaatcttcacaaacatacgtaaatgacttattacagttagttgctagtacaatttctaacaacgtaacagatgaaatattaatttcaactggtggcgatgtactaaagggtgaaactggcgcagcggtagaaagtaaaaaaggaaattgtggttgttaaagagatgtcatattgacatctctttttttttgtggattaaacgtaagttcttctcaaaaaaagaatgacacattccgctattgtcacgcatatgattaagtgaatagtgattgaggagggttacgaatgtccgaatttagagagattattacaaaagcagtggttggaaaaggacgtaagtatacaaagtcaacgcatacatgtgaatcgaataatgagccaacaagtattttagggtgctgggtaattaaccactcgtacgaagcaagaaagaatggaaaacatgtggaaattgaaggtttctatgatgtgaacacttggtattcatttgatggaaatacaaagactgaagttgtaacagaacgtgtgaactacacggacgaagtaagtattggttatcgtgataaaaacttttctggtgacgatttagaaattattgctcgtgttattcagccgccaaattgtttagaagcacttgtatcaccaaatggtaataaaattgttgtaactgtagaacgtgaatttgtaacagaagtagttggagaaacgaaaatttgtgtaagtgtaaatcctgaaggctgcgtagaatcagatgatgatttccaaattgctgatgatgaatttgaagaattagatccgaactttatagttgatgcagaagaagagtaatagaaagctagggagaagttcttcctagctttttactttacataagtggggctgaatgaacatgattctttatgaaatatgttataatgaagaaagactcctgaaataggagataagagtgtccgtgaaatgcgacatatatgaaaatagattatcatgtaagaattatggaggaaaagtatgactcaatatacgcctatgatacagcaatatttaaaggttaaggcagattatcaagatgcctttttattttttcgcttaggcgatttttatgaaatgttctttgaggatgctgtaaaagcagctcatgaacttgaaattacattaacgagccgagatggcggtagtagtgaacgtataccaatgtgcggtgtaccgtatcatgcggctaaaaactatattgaacaacttgttgaaaaaggatataaagtagctgtttgtgagcaagtagaagatccgaaaacagctaaaggtgtagtacgtcgtgaagtagtacaattaattacgccaggaacgatgatggaagggcgtacaattgatgagaaagaaaataacttcttagccgcattaacacattttgaagatggatcatatgcattagcttgtaacgacttaacgactggacaaaatacagtaacgttattgactggttcagtagaagatattttattagaagtgtatgcaactggttcgaaagaaattgttgttgattcttcattttctaaagatgaactaaacaagttaactgaaacattgaaaatgacgatttcgtatgaagatgcaacggcaattccggaaggattagaacatcttgtgaaaaatgtttcacaagcaaaattaattaaagcagttggacgtttatttaactatgtaataagaacgcaaaaacgttctttagatcatttgcaaccagtagaaatttattatacgaatcaatttatgaaaattgatgtacattcaaagcgaaatttagaactgacagaaacacttcgaacgaaagaaaaaacaggatcactattatggttattggacaagacgaaaacagctatgggtggtcgtatgttaaaacagtggatggaacgtccacttatacagaaagaaagaattgaagagcgtttagaaatggttgaaacgtttgtaaatgattacttcttacgtgaagatttaaaggaaaagttaaaagaagtatatgatttagaacgcttagcaggaaaagttgcatttggtaacgtaaatgcaagagacttattacaattaagacgttcattgcttcaagtaccagctattttagaagcaattagtttgttagataacgcttatgcatcgagattaattcaaggtgcagatccatgtgaaagcttaacagaattactaggaagaagtattcaagaaaacccaccgctttcgattaaagatggagatattattaaagatggttataatgacaagcttgatcaatatcgttacgttagtaaaaacgggaaaacgtggattgctgagcttgaaaaaagagaacgtgatattaccggaattaaatcgttaaaaatcggatacaaccgtattttcggttactacattgaagtaacgaaagcgaatcttgcagcacttccagaaggtcgctatgagcgtaaacagacgcttgctaatgctgaacgtttcattacagatgaactgaaagaaaaagaaacgttaatcttagaagctgaagaaaaaattgtacagctagaatacgatttatttacagcacttcgtgaagaagtaaaagtatttattccgaaattacaacatttagcgaaagtaattagtgaattagacgtactgcaaagttttgcgacagttagtgaagaagaacagtttgtaaaacctgtactgacaacgaagcgcgaaatctttattaaagatggtcgtcatcctgttgttgaaaaagtattgaacgggaaattgtatgtaccgaatgattgtattatgccagagaatatggatgtctttttaattacagggccgaacatgtctggtaaaagtacgtatatgagacaattagcacttgtaacggttatgtcgcaaatcggttgtttcgtaccagcaacagaagcagtattacctgtatttgaccaaatctttacgagaattggtgcagcggatgatttaatttcaggtcaaagtacatttatggtcgaaatgttagaagcgaaaaatgcaattgcaaacgcatcagaaagaagtttaattttattcgatgaaattggacgcggtacatctacgtatgatggtatggcacttgcacaagcgattattgaacatattcatgaccaaattggtgcaaaaacgttattctctacgcattatcacgaattgacggtgttagaagagagtttaaatcaactgaaaaatgtacacgtttcagcaattgaagagaatggaaaagtagtattccttcataaaattcaagatggagcagctgataaaagttacggaattcacgttgcgcaacttgcggagcttccagatagcctaatcgctcgtgcgaaagaagtgttagcacagctagaaggacaggaagaaattattattccaaaacgagtagaagtgaaagtacaagaagctactccagaacctgtagttgtaaaagaagaaatagcagaaatacaggaaacgaaagtagagactgaagaagaatcgcaactatctttctttggaggagaacagtcttcgaagaaacaagaaaagcctctgctagatcaaaaagaaacagcagtactggcgcaaattaaaaaaatcgatttacttgatatgacacctttagaagcgatgaacgaattgtatcgcttacagaaaaagttaaagaaaggatgagtaagtagatggggaaaattcgcaaactcgatgaccaactctctaacttaattgcggcaggggaagtagtagagcgccctgcttcagtcgtaaaagaacttgtggaaaattctatcgatgcgaatagtacatctattgaaatccacttagaagaagctgggttatcgaaaattcgtatcattgataatggtgatggtattgcagaagaagactgtatcgtcgcttttgaacgccatgcaacgagtaaaattaaagatgaaaacgatctgttccgcataagaacactcggtttccgcggtgaggcattgccaagtattgcctcagttagtgaattggaattaattactagcacaggtgatgcgcctggtacacaccttattattaaaggtggagacattataaagcaagagaagactgcgagccgaaaaggaacagatattacagtacaaaatttattctttaatacaccagcacgtcttaaatatatgaaaaccattcatacagagctcggaaatattacagatatcgtgtatcgtattgcaatgtcacatccagaagtatcgttaaaactatttcataatgaaaagaaattgcttcatacgtcaggtaacggtgatgtaagacaagtacttgcatcgatttacagtattcaagttgcgaagaagcttgttccaattgaagctgaatctttagactttacaattaaaggttatgtaacattaccagaagtaacgagagcatctcgtaattatatgtcaacgattgtaaatggtcgttacgttcgaaactttgtattaatgaaagcaattcagcaaggataccatacattactgccagttggccggtatccaattggtttcttatcgattgaaatggatccaatgctagttgacgttaacgtacatccagcgaaattagaagttcgttttagtaaagaacaagaattgctaaagctgatcgaagaaacattgcaagctgcatttaaaaaaatacagcttattccagatgcaggtgtaacaacgaagaaaaaagaaaaagacgaaagtgtgcaagaacagttccagtttgagcatgcgaagccgaaagaaccatctatgccggacatcgttttaccgactggcatggatgcaaaacaagaagaaccgcaggctgtgaaacagcctgcgcagctttggcaaccaccgaagcaagaatggcaaccaccacagtcgctcgtgagagaagaacaaagttggcaaccatccactaaaccgataatcgaagagccaattcaagaagagaaatcgtgggacagtaatgaagaggactttgaactagaggaattagaagaagaagttcgggaaataaaagagattgagatgaacgggaatgacttaccaccgctttatccaattggacaaatgcatggaacatatattttcgctcaaaatgataaaggattatatatgattgaccagcatgccgcgcaggaacgtattaattatgaatacttccgtgataaagtaggaagagtagcgcaagaagtacaagagttacttgtaccgtaccgtattgatctatctcttactgaatttttacgtgtcgaagagcagttagaagaactaaaaaaagtcgggctatttttagaacaattcggccatcaatcctttatcgtccgctcgcatccaacatggttcccgaaaggacaagaaacagaaatcatcgatgaaatgatggagcaagttgttaaactaaaaaaagttgatattaaaaagttacgtgaagaagcagccatcatgatgagctgtaaagcatctattaaagcgaatcaatatttaacgaacgatcaaatatttgctttactggaagaactacgtacaacaacaaacccgtacacatgcccgcacggaagaccaattcttgtgcatcattctacttatgagttggagaagatgtttaagagggttatgtagagtgaatagattacatttcaaaagggagcaacatttactgttgctcccttttaatatgtagatttaattgtaaacgagaatatggtggagtaattttgtagtgtatttcttggttgcgttaacttaaatttatctatgtataaaaaagcgctgtatacagcactttttaaaaggtgcatgaattgtatcattactaactaaataactatgcatggccaaatgttgcttcttatttagccaattgtcataaggatctatacaattacttatttttattattattaattttttcagtgtatagaacttgctctttatagtgcttcttaattgggaagttatgtgtacctgtgccgttcttgaattttttgtcaatggggttctttagaggaactgttgtagtttcagtaaattcatatgggtaatttattttagatttatcttcaaacatgaaaatgcctccttttaggatctcctaaattctttactataacatgatatgcatatagatattttttggactagttatttatataggttaatggaatttaattacataactaatgaaacattttaaaggaaaacaatttgagaaagaaatggtatgatagatgttggctcctattgttatttttttgtttaacagcacagtgaattgtgcatataaattcattatagattgtttttataatatggtttatatggggttttcctgataatataatgtggaatattatagtgttattaggttattaggaacatctaatgctgtttcataactgaaagggaattgaaaaaaaactgaaacttttctcataaaaattcaatctaacttgaaaaatgaaaggaaaatgaaattttccaaaagatattctttgttaagataaaaagcatacatacaaaaagcattgacatatcttaaaaatttattttcaagatatagtgggggaaaagatgagattagaaaaacaattaataaaaaagatgtattatgaaacgttcctaatggagaatgaaacaaaaccaactcttgacgtacttggacaagcttatgtaaacgaagaaaaaaatgagatttctgatgggtcttatattcgttttgcacaaggtgaattttattatcgtcatcaagattttgaagcagctatttttaaatgggagaaggttagtaatgaattagcaccatgggcacaaaaaaatattgcggatgcttatttcgaacttaatcaattaccatatgctgaaaatatttatacttccattactactgataataaaatattgatgaccgaaattagattacaattactttctctttacattgagcaaaataattttgattcagctttcggtgttattaaagaagcagtttctttaaatcctgattatccgaacgtcacaaaaattgcccgttccttttatgaggaacagcaagattttgatagtgcagtagagcttgctgtgaatgagttaattcgaatagagtcgtatccgtggtttgaggtgttaaaaggatatatcgataaagggtttactaaacatatttcaccagactatttttatgatgcattagctacattaaataatgtagatcaagtacaatttacacaaatggtttcagcactttggaacagttataaagatgaaccaaattatttattatggcttaatacaataaatgaatttttcttacatattgaaatacattcgtccgatatatggaacaaagtttctgctctttacgaagaaacgtactttacattaattcaaggtcaatatacgcttagacaattagacgatatcataccaaatctgttagcaaactggttaaaggtagtcaatccatcttatgctgtatttccatctgcagctgtattggcatgggatgagattttcccttccaaaatagattcagcaaatatagaacatgcggaaaacttactgtcacattctattaatcatgtaaatggcttagagtacagcttacacctttttgaatctattacacagtgggcacaaaagcagaatatagaaataggtcaccgatttaaatggttagttgacgagctcgcagatttaagaacaaatcgtattttagtaacgggaacttcagggaacggaaaaactacatttattaactctatattaggagaaaatatattagaaaaatcaatttcaaatgtagtagttttaaaaaatgatgctcatatagaaataaacgctataacagactcagcaattacaacaacggaagatgtctctgattaccataatatgatgtctcagcaccatcaaacatatagagatagagcgtgtgttgaatttaaattaccatgcagatttttaaatgaaaataaacttacatttgtagtgacacctggctttaatagaaataacgacactagagatgaaatattcgaatatttaaattctgtagacgaattactattcgtattgaatgcggattcaccttttactgataaagaacgtgatattttattaagtattcaagaacatacgccaaatttacaaattcattttttattaaataaaatcgataacatttacagtgaagcagaagtgaaaagggtattacatgatacggcaacgagaataaacacatatttcccgtatgcgagaattttcccttattcctcgttatatacaagtagtcaacaattaaatggtttaactgagtttattcattttaactttaatcataaaaatatcgatgcagaacgtactgaaaagttattatttttcattcgaaaaacaattacatatcttttggataaacgtgttgagaaagaaaataacctggtggatgctattaattggaatgaagatatgctagtgaaactaaacggtagcattaataaccttactgcatttgaaagggaaaaaattcatttcattacacaatcatatcgttcaatgaagactgaaattacaaatgatcttaccgaaaatattccgaagatattaaagagctgttctaatttaattagtgaagaaagtgatttcgggcacatggatacggaactaaataaagcaatgaatgaaagagtgcataaatatttagaacaaactgtattacctaatcttgctctttctatgcaaaattggattgcaacttctaataatgagcttcttcaaagtcaaacgtatttagaagaacttagtgaagggcttaattcactatttggagaaaataaaatacagttagaatgtgactttaaagtgcttgatgactggcgcagagatactgacaggatgacgactagaatacaaatggatgaagtaaatattttacgtcgatttacgccagcacaatttttactaaaaagtgccggtaaattatttggagttcttcctaaaaataaatctatgctatataacaaatataaacagtatgtagaaaatgaagattatactgaagtaacggcttctattatgaagaaatttttcttgcaatttgagctgtttgaaaacacacaagagagggatattcatatattctttaggaatccatttaactccttaaagcaagctgtagaaaatacgcaattagaaatacaagaaaaacaagagatgttacataaaatgaaatcaaatcctgaagtttatcatgattctatcatgctctttgaattgagattgcgtcaatgtgaagtaattttaaatataggtgatgataatacctatacagatgtagctttagaaacaagtgtagaataaaagtaaaagggagcaactgtaataagttgctcctttttcatatagattatttttctgtttctttaattttagtttgtacttcgccagttttaattttattgctttctgagaaacgtaataaatcgccttcaataattttgtcagacattcgtaattcattttgtgcacgtttaatgagggcttgagcttctttttttggtaaatctacaatttcacctgttatacggtcgtagaaagtgttgtttttgtatgcatacttatctgtaacgaagctaccatcacgtaaaacaacaaagccagtatattcatctgaaaacatatcatggccaaaacggatatcattcgtagaatcaacacctaataaatttagaatcgtaggtttcatatcgatttgtcccgtaggctttgaaatagtttgaccttctgtttgtccaggaatatgaatatataaaggtgtacgttgtaaatttaaagtatcaaattctgttatttgatctttttctaaaaactgtgccattgcacgattatgtttttcggaaattccataatgatcaccgtataacacaataatagaattatcgtaaagcccctcggcctttagacgttcaataaattttttaatggattcgtctaagtaacgtgctgttacgatgtaacgatcaaatacgccattaccagagttgtatggttcaatgaattttgtatcttcatcatacgtaaatggataatggtttgttaaagtaaggaaacgagcatagaatggttgattaacagtttttaatatatctactgattgatcaaagtattcgatatcttttaatccccaatttaaatttgtttctggtgtaattttgtaatcaagctcattatagtaacgatcataaccaagagcagagtacatgatattacgattccaaaatgttgcgttattcgcatggaatacagaagtgaaataaccttgctgacgtaaaatttctggagttgcagtataatcattgttaccgtgtgtgaagaatacagctcctcgatttaatggatacaacgacgtatcgattagaaattctgaatcggatgttttcccttgaccagtttgatggaaaaagttatcaaagtaataactttcatttatgaattcatttaggaatggtgtaacttcttgcccgttcactgatgcgcctattaagaaggtctgcaaggattcaagagtgacgacaattacgttttttcctttcgctgcaccaaacatattagggtttggctcgctttgatttgcttttacgtagttttcagtttcttgtaatttactactatcagcaagtgctttttgtgacccagcttttacttgcagtgttaagtcatatacttggtgagtatataagcctaaatttttgacaagcatgactcggtcgaatgatcttgttaataattcagggcgctctttttctgcaagatgtagattcgcaaagaatacaccaatcgttaaaagaaagtataacaagcgcgtagaatgagttacacgttctgttttaaagaccaatgatttcttttttaataaaataaagaagaaaacaatgtctacgaatgcgagtataattttgtagtttaatatttctataatactgccgcctaattggccaaagtttgaggtttgtccaagtactggtaatgtaacgaaatcactataaaaatcatagaacattacatttccaacaagcacgattgttaataagaaattaatacagagcgctatataatttcgcttttcaccagttgcaaataatgctaatccaacaaatgctaatgatgcggctagagggctaataaacaaaatgagctcttgcgttgaagactcgatttttaaatcaaaactgaatcgcgtaataagatatgtttttaaccatactgctaaagccattattataacaaaacttatattttgcatttgtaaatttattttgttcttcatttttacaccttctttatataatttatttaactaaagttatatattatgtttttataactattagactgtaatgaaccatttagactttgttttctaaagggaataatttgaagtattcatatatatacaatggggatttttaaagcgtagtagcataaatataactcttttttgagaaacaggcagaaaaagtcatagttgtagtgaaattgacttatagacatcctaccatattaaacactatgatgatgttacaaaatatcgaacaaataaaagtgaaaatggatagagacttttaaaactgttgacattcaatttattagaattgaatgccaatcgttttaaatatacagttatattacatatgtattttgtaaaatcccgattttttgtcggttaatcattagcagggaaggataggggtcttattaatatacttttactatatataagtaaagtgttttgaaattgaaaatatttgactgatattttaatgatagaaattaaatgtcagataagtactttccaacatacagaccacttgcagctgcttgagataatgaatgcgtaacgcctgaacaatctccaattaaaaatagcccatgtatactagtttcaaaatgattattaatttttatcgtaggagcatagaactttccatcaattccatatagtaaagtatgttgatcgataggctcctgtataaattgttctaagcgtaataaaaattcttttagcccttcaatatatgattgaggaatttcttgattcaaatctccataatccccctgtagtgtaggctgtatacgattatgctccatgctgttttccaccgtaggttgtttctttagtaagtcctctaagcgctgtataacaatccgatctcgtccttggttaatgccttcaataattgaacttgcgtatgcatttgcttctttgagagttggaaaatagcgaggaataaataaagtgaaatttaagttagaagtgccagttccttgttcccgaaaattttgaccgtcaggcataactaaaccttcttcgtactttcgaatgatgcggccttgtggattcatacagtaagtagttgctgtgaaatgctcaccttgataagaaagttttgtttcaaaagtatcttttaatatagaacgtaattgatgttctttcatttctactctaattcctaaatctacacgtgtttgctcctgagaaatatttagggaactgcatatttcttttaaccaatcggccccagagcgcccagttgcaaatacaagttgcttagtttgaactgttccttgatttgtctctattgtaaaatgatcttcctgtttcagaatatgttgtacatctatatgaaattggatctttattttcgtcagtaaaaattcatagagctgctgaaaaatgttactggaaagtgtagtaccaagatgtcttacttctgttgttagcatttgtaaaccacacgcttcagctctcttagtgagacttgaattttcagtagaatattttgaaaccgaacttccaccaaactgacatagaatttcatctacttcagccatgagttgtataaaaccctctttaccgacttttttctcaagttctccgccaaatccgtttgtataattaaatttcccttcagattttcctaaaccaccaaacccgaaatatttatcacatgtagtacaattacacacttttccttcgtctaaaggacaatggcgatcttctagcgctttacctttatcaagaattaaaacttttttgttacttttagctagtgaataagccataaaaatgctacttactccagcgccgataattgtaacatcatacatattcttccacctgctaacgaatagtttgttttttatttttctagtgtataacaattttatgaagttaagaaatagcttttattaataaagtgggagtttttgaacttgatgctttattaatttctacgagtggcggagtaaatacaaaaatttttatttgaaagaagaaatagtttaaaaaataactatgtcatatgattaataacatcttacatagaaaaaaaacagaccttttaagtgaagaggtctgttaatgattttaaatcttatttagcaaacacatgattaccaattactgctactgtctgacgtgtcgtaatccacttgtctgttgatgtttttggattgtagaaataaagccagtcagaatgtactccatttgtggagatagcctcttctacagccatttttgcttctgcgcttgcaggctgattaattcttccatctgtaacaggagtaaatgcatatccgtatttaataggttcataaataacgcctgttattgtatttggaaaaccttttgcatttacacgatttagtataactttcgctactgctacttttcctttataggattcgccacctgcttcagcggtaactaagcgtgccattaagtctttttctttttgtgaaatacttgagttgatttttaaatgttgtcctgtataaagcttgtttccgattgtattgttaatttgttttatagattggacagtgacattgtaacgccttgctatcgtttctaatgaatctcccggttgtacttgataaataatttgtccagaaatgttcgcaggcttggcgttttgaggaacagtgatttcatttgatttcacggaccctggaatatgtaactgttcgccaataaaggtttgatcgtttcctttattattagcctgtttaatggattgtattgaaactccgtattgtttactaatgccccaaagtgtatcgttcttttttactgtatgaatggtagaagcttcagctgtgctttgactacatacgaatgtaattgcagctgcagataaagggattatatgttttagttttagtaatttcattgtaaatcctcctaagaaaaaattaaggtgaaactattaagtaatgtagtttgaaatgtatatatgcgtaatatattaatgtaagtatattagcacatataaaataaataatcactataagtttcatattcgtgtagtgtagagtccgaatatgaaatattgcatatgaaaatacattgaagttcatatttctgattactataatctatttagtagaaagggaatacgttatagaaacgaaatcattatagattaatataatgattaattattaataggaggattaatgcaatggaaatatttcaaaaaatgtgtgcgtcaactgtaatcattacaacacttttaggaacagggggtactatcaatagtgtacatgctgattctatagaacagcagattaaatcagggatagaacaagaaacagataagcaaatcattgtaaaatttaaagcggatttggatttgccatatgaagatggtattgaaaaacaaatacaatctcaaacgaatgataaagtaataaaagatcttttgacagaatatccagatgtaacatttactcgtttattcacatctgtaagcccggaacaaatacaaaaccttgaagtgaaagcacctaatcatgtatctacaagtttattaaactactatattctgcaaaatcaaaatagtgggtatgaagaagaaatagtagataagttaaaggcatcttctttaatagaagatgcgtatatgaagaaacaagagaaaataatgccacctgaagtgcaatcatcaagtgtagctcttaatcctagtaacaatcctagatttaaaaaacaaggttatcttgaagcggccccatacggtattaatgcgcctttcgcctggggaattcaaggcggtaatggaaatggtatcacttttgttgatatggaatacggatggttattaaatcatgaggatttattacatcaaaaaattgagttaatgtctggaagaaatatagatcagcatgtcggtcatgggacgtctgtactaggaattgtatcctctgaggacaatgaagttgggaatattgggattgcgccaaaagcgaaagcaaaggttatctctcaaataagagataatggacagtataatacggctgatgcaatattaagcgctgtaaatcagttagaagctggggatgttttattgttagaggcacaagcatctttcgatggatatggtgataaatatttacctgttgaagtacaaccagatatctttgatgcaattcgtgctggtacagataaagggattgtaattatagaggccggagcaaatgggtggaatgatttagaccagttcaaagatagaaaaggtaagcaagtcttaaatcgtaatagtaaagattttaaagattcgggtgcaattatggtaggagctggctcttcatctttccctcatgaacgtatgtggttttcgaattatggaagccgtattgatgtgtacggatggggagaaaatgtagatacaactacagccgagcaaagtagaagtgctgtaaatctttatacttcaagctttagcggaacatctagtgcttcgccaattattgctggggcagcgactttagtacaaagcattgctaaagaaaatttaggacaaccatatagaccaagtgaactaagagcaatattaagtaaccagagcacaggaacaaaatctaaagatccatatgcagataaaattggtgttttaccagatttgaagtctatactagcaaacttaggctatgaacaaagaaaaccaaacggtgggaatgaattacaagtaacagaaaatgaaccaaataatgagcctagacaggcaaataaagttaactttcatacaccggtgaaaggaacgctacataatagtgatagagtagatgtatttactttccaaattgattcgccggaaaatattaatatttctctactaaatgaacaaaatattggaatgacatgggtacttcatcatgaatcagatttaaataactatgtagcatatggtgaaaatgaaggcaatgtagttaaaggaacttataatgcaaagccaggtaaatattatttatacgtctataaatatgagaataaaaatggttcatacgtattgaacataaaataagtaaaaggaacttcagatgaagttcctttaaatttttctaatttagtatatgtgaatgattttttaactttacttctatgcaatatttcatattgatgaaatgttatttattttttctgagctagcttatattatattcaataagtttgatataaaaacagaaagagagagggataataatgagcaataagaagttaattttgaaattattcatatgtagtacaatatttatcacatttgtatttgctttacatgataagagagtagttgcagctagctctgttaatgagcttgaaaatttgtcaaaatggatgcaacctatacctgataatatcccgttagcacgaatttcaattccaggaacacacgatagtgggacgttcaagttgcaaaatccgattaagcaagtatggggaatgacgcaagaatatgattttcgctatcaaatggaccatggagctcgcatttttgatataagaggacgtttaacagatgataatacgatagttcttcatcatgggccattatatctttacgtaacactgcatgaattcataaatgaagcgaaacaatttttaaaagataacccgagtgaaacaattattatgtctttaaaaaaagagtatgaggatatgaaaggggcagaagattcatttagtagcacgtttgaaaaaaaatattttgttgatcctatttttttaaaaacagaaggaaatataaagcttggagatgctcgtgggaaaattgtactactaaaaagatatagtggtagtaatgaacctggaggatataataatttttattggccagataatgagacgtttaccacaactgtaaaccaaaatgcaaatgtaacagtacaagataaatataaagtgagctatgatgagaaagtaaaatctattaaagatacgatggatgaaacgatgaacaatagcgaggatttaaatcatctatatattaattttacaagcttgtcttctggtggtacagcatggaatagtccatattactatgcttcttatataaatcctgaaattgcaaactatataaaacaaaagaatcctttgagagtgggctgggtaattcaagactacataaatgaaaagtggtcaccattattgtatcaagaagttataagagcgaataagtcattaataaaagaataaagatgatgagagtaagaagcgataaaatatatcgcttctttttcttttccaataaccaacaatataaattgtacttttataatagaaaaaaataaaaacataagatataatcatacatataaaatttgtacctataaattttatatgtatgattgaatttgatttgttgtaatgaaatggaggtatatactatgaagtttccacatgattttttattcggagctgcttcagcttcttatcaagtagaaggtgcatggaatgaagatggaaaaggtgttacgaattgggacgagttttcaaaaattcctggcaaaacatacaatggaacaaatggtgatgtagctgttgatcattatcatcgatataaggaagatgttcgcttaatggctgagatgggattagaatcgtatcgtttttctatttcttgggcgagaatattgccgactggagatggaaaggtaaatgaaaaagggattgaattttataacaacttaattgatgaatgtttaaaatacgggattgtgccgtttgtcactttatatcattgggatttaccattaccgttagaaaaagatggtggatggacgaataaaagaacagcagaggctttcgtaaaatatgcagaaacttgttttaaggcatttggtgacagagttaagcattggattacttttaatgagaccgtaatgttttgtggattaggttatttaaaaggtgcacatccaccaggaatacaaaatgatgttccaaagtattttcaagctactcattatgtattttatgcacacgcgaaaacagttgcggtgtacaagcagctgaaacaatatggtgaaattgggattacacatgttttcttaccagcttatagtgtggatgatcaaaaagaaaatatacaagcagcaaatcatgcgaatgaatatgaaacgtattggtattatgatccaattttaaaaggcgagtatccgtcttatgttgtacaacaattaaaggaaaaaggatggactcctaattggacggttgaagaattagaaatcattaaacaaaatgcagaagaaaatgattttattggcttgaattattatcaaccaatacgagtagaaagatacgatatggatataaagagtgaggaacattctcgagaaaactcaacgcttgctccaggtaactcttcttttgatggtttttatcgaacagttaaaatggatgataaaacatatacaaaatggggatgggaaatatctcccgaaggtttcttagagggattgcatatgttgaaagcacgttacggtgacataaagatgtatgtaacggaaaatggacttggtgatgaagatccgatcattgacggagaaattgtagatgttccgagaattaaatttattgaagcgcatttaaaagtaatgaagcgtgcaattgaagagggaattaacttaaaaggttattatgcatggtcagtgattgatcttttaagttggttaaatggatataaaaagcaatatggctttatttttgtcgatcataatgataacttaaaacgtaagaagaaactttcgtttcattggtataaacgtgtgatcgaaacgagaggggaagagttataacagataaaagagtattttaggagaaagtgtatgagtgcaaagtataaacaaattgcagatgtgttagagcaaaacattcgagatgggctttttaatgaaacgaaaaaactacctacagaagaagcgttgatgaatcgatttgaagtaagccgtaatacgatacgtaaagtaattagtcagcttgtgaatagaggttatatttttcaagtgcaaggtagtggcatgtttttacgcgaaacttctgtaacagattacattaatttaggaagtttacgtggattaacgaaaaatcttgtttcacaaaatattgaaacgaaagtgttagagcttgaagtaatagatgcggacgaagagatagcaaagcagatgcaatgcgaagctggaactaggttgtattttttgaagcgcttaagaattgtagatgctaaaccattctctattgaagtaagttatttcaaaaaggatattattccatatttgaacgaagaaatagcattaagctctgtatacagttatttcattgaagatttacgattaaatattggttttgctgataaagttattagttgtgaaaaagtaaataaagaaaatgcacagtttttagaattaaatgaaggtgatccggcgcttcttattgaaaatacagtgtatcttgtaaatggaacaatttttgagttatctcagtcgatgtttcattatgaaaaggcgaaacttttaaatcgaattaattttaaatgaaaaattattgtgtgaaaaaagcaactggtcctaagtgatcagttgctttttattttttaagtggatgagcaaaaaaacacgaaagtggttggtccgctttttgcaaacatctattatgataagagaagaaaggtagtatgttatcaacgttttaaagaggaaggtttttatgtaagttctttaattaaaatagatgggtcttagagaggtgaaaagacaatgagttttgcaatttcactagtcgttattattgtaattgtatcgctatttgggactgtactagttgcaagaaacgtggaggagaattacggtaagtctacaaaaagaaatgtgaaaaacttatctgcaatctatattcttcttctttttgttctactagttggggtaacatggtatgcggtcatgatctgatagtttgtaaaagaactgaaatgagagtatgaagttggaattttagaagctatcgagtaatcagaaagagaaccattttggatatatccatttacggataagaaaatgtgactaattaatactatttttacggtgaatactgttagtaaaaaatgaggatagttcgttttgaaaggagggaactatatggaatggaaaccaaatcgtgcagataagacacctgtatataaacaaattgctgattatattgaaagaggtatttcttcaggcgaatttccttctgatagtaagttaccttctgagcgtatgttagcaaaggaattacaggtgaaccggagtacaatagtagctgcgtatgaagaattaaaatcacttggagtagtagaacggcaaaagggaagcggaacacgggtgaatacagacatatggggtgtctcacataaacgaataccgaactggggtaggtacgtggaggatggatcgttcttacctaacgtaccactcgttcaacaaattcgaacggaaacacaaaaagatgatttaattaatttagcaagtggtgaactgtcaccagaattaattccaagtgatagatttcgaacaattttgtcggagaaaacatttatggaaaacctcggttatgaccatccacttggaaatgagatgttgagaaaaacaattgcagcacatgttcagcaatataaacaaattgaagcagattcaagctctattcttattacgtcaggagcacaacaggcgcttaatcttatcgttcaatgtttattaaaacctggcgatgcgatcgcgattgaagatccttcgtattgtttttcgcttccaatgtttaaatcggccggtttaaacatatttcatttacctgttgatgagcatggaatgaatccagatgacttaatcgatttgcacaaaaagcatcgcattcgtatggtatttttgaatccagattatcagaatccgacgggtactgtgctttcattagcgagacgtaaaaaaattttagaactgtcttctgagttcggtataccaattgtagaagatgatccgtatagtttaatctcctttaatggagaagtgaacccaacattaaaatcaatggaccaaaatggaaatgttctttatataagttcactatcaaaaattgttgcatcaggattacgtattggatgggtaattggtcctacacgcgtaattgagcgtttagcagatgcaaagcaacaagttgattttggccatagtgtatttacgcagtgggtagcaaatcaatttttagaatcaaaggatttccatacacatattacgatacttcgtggacaattgaagcaaagaagagatgaattaattgcagagcttgaaggaacattgggagaacgagttgaatgtttcgtgccagagggtggaatacatgtatggtgtaaagtaacaggaaagtttgatgaatatcacttattaggtgaatctatacggaatggtgtcgcatttgttccgggcagtgttttaggttcgaaaaatgaatatatacgatttacgtttggtagagcgaatatagaacaaattcaacttggaattaaacggtttgccgacacgctaaatgagatttcataatatggatgtgtgatagtgaaatgagggaaagaaatgaagtacgtgacgcttttacttcaagtaggcgtgctatatgtatttagcctagtgggtacgtggattcaggaaatattccatctatcaataccggggaatttaatagggatgttaatactgttcctgctcctttccactcgcgttttaccgttagaatggtttgagttaggttcggaaaagttaatcgtatttttaccgttatttttaatcccttcgacaacagggctcatggaatacgggtcttttcttttcagtaagggaagtattatattccttttagtagttgcaagtactgtagtaactttgattgtttcagggtatataagtcaattattagtcacatcaaaaaaataaaatcgacaaggtgcacgattcaaatggtcttaattattattactgtagcaatttatttcttggcgacaaagctatataaaaaatttacgtttgcatttacgttaccagtgttaacagttacggcaattatgatttgtttatttttgatttttggtatttctcatcatgagtatagggaaaatgggggaaacattctttcaagcttattgagccctgcaattgtagcattggccatacctctatttaaagagcgaaagatactgatgaaaaatttttcatcgatactaatcggagtagtgataggtatagtggctgtaacgagcatgaatgtagtgattggcggaattttaaatatagataaggaacttatattaactactttaccacaggtagcgacaatgccaattgccctttcaatagcggatcaaattggtggtattccatctatgacttctagttttgtagttgttgcaggaataacaggtgctatgatcggaccaacagtacttaagtttttccgtataacaagtacgattggaaaaggagttggaatgggctgtgcatcacatattatcggtgtgagtcgtttagtgaaagaaggcgagaaagaagcgactatcggttcggtaacgatgattgtaactggaatacttattagtatactaataccgtatggaacgaaatttattttttaaatgtaatggagatgataacaatgacaacatggtttatagttacattatttgtttttggagctattaaagtattagtttctagcatgcccacttctgttgtagaatcaattattagtagatttgaattgcatcaaaagcttgaggcggaaaatacttctatatcgatagatggaaaaaatatagagggagaaatgaaactacaagttattcatgaatttaatgaggcgttgtttttagataaacattatttcccgccgcacggagaagggacaccaatagtcattgatacgaagaaagggagtaaagagattagattttcgctatatagctatgaggaacatgttgatgtcattaagcaatataagaagaaagtcgttgcctatcgtttacgctctaaaagccttcaaacattgacaccattagtaataacggaagagtatgcttaagaagagacctataatggtctctttatttttttatccaattatatacgttccaaataaaagaatgaaaaattatataaccaaataaagaatatgtatggttccaattcgcactatgtacaaataaacctaaactttcagcaatctgttcaaaaaggctagcacaaataccgattgaaataataaatgaaattctagaaactttagataatttttttgaaatgtgtataaagataactgttaaaatcggcagtacgaacaatgtaaaagctatattaaccgaaaatgtggatgagaagggcctagccggaaaggaatatatttgtttatgaacaaaaaaggcatctaagcaagttgcaataatagaagagagaaagattgtaactactaatgctagaaactcattcttcttctcggaggaggacatttttctttgcgagaatggcgatttcaattttttcgagtgttttgcagtagtcttctgtaatttgtccatttatattttcctccttatcaactaagtaatttacaacttgccaatcggtaaaccaatcttcactgtcaacttcttcatgcttcatatctcgccatgcatagatgagtgcagggctgtatatacgataagagccatttcgtaactggcatttcttaattcggcgcttataaaactcacgggaaaaagattcatttacacttgaaaataaatggggccagtaatctttcctagatcctgtatgtggatggtgttgagcccagcttattatttgagataaaacatgtgtatctcgaaataataatgagtacaatctttttccaattaatatccgttcatgtaaggaagtgaaatgtttcattgtatcaccaaatagtaatactttttgtttcttatcattttcgtagaatgggaaaaggatatgattaaactgaaagaaatcaaagagtttaaatccaatactatttagtacagtctttttaaattgtacattttgaattactcttttttctaagtagttttgttcattaataatagttgcaattgctaaagtttttttgttacctgttttccaaaaatggttccacatcgtttccataaatgtagaaacatttaggtgagggagaaggtgaaataacttttgtgatctctttacactttgttcgtaaagtaaaaattgagggtatacatcttggaaaataagccaattccctctttctaaaaaagaaaaaaatatgaattgatctttctctgataaaattctcgtatataaatcgccctttaaatcagtcatattccaaccgccgttacgtgataccatatgcccaagcagtgcccaatgtatttctggatattgaatgtaaaattggtagtatgcgcgtgttcttgtaacattatttttatttagttgttctgtttgtatttttattttgttgatgatgagttgttcttctttcgttaatttatacatggtgtcagaaggaataagtttgcttttttgtttcaattcattttttacgtcgaatagggagagaggcagtgctttggaaggtccgttatatgtatgatttgaattgcttcggtccattccgttacctccctttttcataaatttaaatatgattattggctatgaatcattctatttattttattacgagtataagaaataaatgagcggtgtttttttacaaggaatttatttatcatgcaaacagtataaaaaatcttactgttgtgagatgaaatgaaaaacagaaactacgtttaatagtttctgtttttttattttgtcaattaaatgtaacaaacgacgattatgatttgaatcaattgaaaataattcaataaatattatttaaattgagatgtttcgtaggaggaagaagaatgttaaataaaataattttaattactggtggtacaggttcgtgggggcatgaacttataaaacaactattagaaaaatcaccgaaagaaattagaattttttcaagaaatgaaacggttcagtttgaaatgcagcaacagtttataaatgatgataggttaaaatttattattggagatattcgtgataaagatcaactagtctatgcttgccaaggtgtacattatgtgttccatcttgcagctttaaaacatgttccagtatgtgagtattatccttatgaagctataaaaaccaatatacatggtacgcaaaatgtaattgaagcctctatacagatgcaagttgaaaaagttatatatgtttcaactgataaagcagctgatccatcaaatacgtatgggatgacaaaagcaattggtgaaaaattaatggttcatgcgaatatacaaacgaagaaaacaaaattcatttgtgttcgtggtggaaatgttttaggaacgagtggaagtgtagtaccactttttaaacaacaaattaaaaaatcttcacaagtagggattaccgatgcgaatatgactagatttttcttaacagttgaagatgctgttgggttgttatttaaagccgtatctcaaggtagaggcggggaaatctttgttatgaaaatgccggcatgtaaaataacagatttagcagaagtattaattgaagattccggaaaagaaaatgttaaggtaaaagaggtagggataagaccgggtgaaaaattaagtgaaatgcttctatctgaggtagagagtaaaacaagtataagttttgatcaaaattattttgtggtactaccgactattcctatacaaggacttcaacaatattattcaagctatcctctagtggatgtgaagagttttagttctcaacaagatttacttgcaaaacatgaggtgaaacaaatgctattaaaaggagggtttttgcgatgaaaaaaaatgcgagccttttaataactggtgcaaatggtttcacaggacgccatgcttgccactattttttacagcagggctttcatgtaattcctatgtttcaaaatcgtgcatatggagaaaaaattagaaatggtattacttgtaatttaactaataagagcgaagtaatgaaggtaatgaaacaaataaagccagactacgtattgcatttagcaggaaggaattcggttatagaatcttggacagctgcccttgaatatatagaggttaatgtaataggaacattatatttattagaagcaattaagcaagaagcctcgcattgtagaacattagttataggatctgctttgcaagcagatagtatgaacgaaataaaaatttcaaatccatatagtttaagtaaaacgatgcaagttattattgcagaggcttggggaggattaatggattcaaatattatcattgcaaagccctcaaacttaattggtccaggggaatcgaatggcatttgttcgattctcgcaaagaaaatgatagatatagaatcaggtagaagtaaagccattattgaagtaaacagtttgaaagatagtagagattttctagatgtacgtgatgcgattaaagcgtatcatgtgttattacgagatggaataaatggaaaacaatataatatcggatcaggagtaaaacgatctttgttaaatgtactagaacaatataaagaattaacacagctaaatttttttatagaggaaacagagaaaagtgggagcgactcaaatgagagtttagcaatagaggaaataaaaaggttaggttggatcccagaaattgaatttcatcaatcattaaaagatgtacttgagtatgcgaagtgtagtgacatctgcatgcaatgaaaaacaaaaaagggtgtaaaaaatatatgaatgattatgaaataatagataatcaaaatacgctatttctttcaattgttgatgcgttggattggagagatgaagaagcgcatgtattgcgtctttatgaggcaatacataaatatcaagcgtatgtagaagaaaaaagggttaatcaaataaagtcagcattagagacggaaactagatatgtgattcaaatctttgctcaatacgagtgtagtgagtatggaaatgatttttatgaactcattaaagatcttttacaagatatagaggtggagttaaagatttatataaaaaataataattttatttacatttaaaaggtaaatataaagctagatttttaataataaaggtgggtataagttatgagcaaaacgattctttttactgggggcggtacagccggacacgttatgattaatattgtattaattcctaaatttatagagaaaggctggagagtcgagtatattggatccaaaaatggaattgaaaaatcattagtgcaaaatgttaaatacaatagtgtttcaacgggcaagcttaggagatattgggattgggaaaattttaaagatccttttaaaattatacgaggttgtttacaaagttataaattaattaagaaaacaaagcctgacgttatcttttcagcaggaggatttgtttcagttcctgtagctataggagcatggttaaatcgtgtgcctataattatacgtgaaccagatagcacattaggacttgccaataaaatagcattaccttttgctacaaagctatgcacaacatttcctcagacaggagaaaatgtaagtaatgagaagaaggtttatgtaggaccaattgtaagggaagaaattgagaagggtaacgtattacgaggaagaagatattgtgaatttcagcaagataaaccagtattattaattatgggtgggagtcaaggtgctaagtggataaatgatatggtaagggaatgtttagatacaatactattaaactttaatattattcatatatgtggtaaagggaaggtagacccatctattggcatggaggggtatatgcaatttgaatatataggcgacgagttgccgcatatactaaatatggcaagtgttgtagtttccagagcgggttctactgctatttctgaattgttatttttgaagaaaccgatgttgcttatcccgttaactaacagttccagcaggggagatcaagttttaaatgctgaatatttttcacggcaaggatatgcggaagttatactccaagacagagtaagtacgaatacatttatacatgcagcaaataagttgtatacaaataaggagaaatatattcaaaacatgaatggatataagaaaacaaatgatgagggaattcatcaaataatagatataataaatgaagtggtggagtaatagaaatgtaaatagaaaaacaaaaggaaagaaggtattttctttcctttttactatatttgttcaaattcattattatttattctaattagttatgtactatcggtgaatgccgttttctaatagctcagtaaatgcatgaatatgaataggtttactgtaataataaccttgaataaactgacatttatttttttgaaggaaatttacgtgctctttcgtttctacaccttcagcaatgacagacattcctaatgtatttgctaatgtgatgatcgttttaataatttccattccatcatcacatgtttcagacattgtaataaattctctcgggatttttaacgtatcaattggatacaaaggtaagtaggctagcgaagaataacctgtaccaaaatcgtcgatagaaatgtgaatccctaaactttttagtgtacgcagttttatcaatgtttctcgctcatccatcattgcaattcgctctgttaattcaagatcaagagagcttgctggtaaacctgtatttgttaaagtagaagaaatagactttacaaaatcctcttgttcaaattctttagcagataaatttacacctatttttaaatgtgaatatccgagtgcgtgccaacgtttcatttgcttgcaagcctgctctaatgtccattttcctattgaaataatttgtagtgtttcttctgcaatcggaataaactcgtatggagaaataatacctaattcaggatgattccacctaattaaagcttctgcaccgataattttattagattcactatcaacttgaggttgatacaaaaggaacaattcttcattttgtagtgcgtttggtaaatctttttctaatcgtaatcgtctttcaatttttttagcgattacatcgtcataaatagagacagagttaagctcttttgcttttgcatcatacattgcaacattagcgtttttcagaagtgtagcggtatcgattccggaatgtggataaatagcgatgccgatactcagtgataaagttaatttatgctcatgtatgataaatgactttttcatgcattcaaataattggttacataattggaataagtaatcttcgtcagtatagttttcaattatgattgtaaattcatcgccaccgattcttgaaagatgagtatgtgatggaagacatgattggaatcgctttgctacttcttctaatatgtaatctcctgatgaatgtccaagtgtatcgttaattgctttaaagcgatctaaatctaaatataataatgcaaactcgctttctgctattttagcattttttataactctctttaatttcttatggaaaaaggcacggttcccaattttcgttacagtgtcatggaatgctaaatattttatttcttcttgctgtttttttagtgcagtaatatctttcaccataatatagcttcctgaaatttgtccgtctattataataggaatgattgtaacgtataaaaaataagtaaagccatctttatattgagaactaagttgtaagaatgccgattcttgttgtttcactttttctaatgccaatgctagcttatgcttatcttcatctaaaatgatcgaaaaacaagtttcacctagtaactcatccgttggtgctccaagtagtacactcccagccttatttacatttaagaatattccatttaaatcaatggtgaagatagggtcaggatgatattcatataatgatttaaacttttgctgtttttgagaaagagcctctgatttatgaactaaatcagacgtccgtaaagtaactttttcttctagttgggcattaaatgcctgcaaacgttttgttaaggaattgttttgcatacgtacgatagaatgacgaatgagtacgaaaataaaagtaatacaatttcctgtaatgagagttgaagatgatgtttgttcttttaatgtaaacccgattagtattgcaacagcaagatagggaaatacaactaaagctttttttcctattatagggtttacaaggaaataatttttatgggtattatgatcttctgaaatagagccagctattgcaataagtaatataggtattctatataaaagacgtaataatattatagtttcagttgataagtggttatttaagtaaaaataaatatagttaaaagttgcagaacttattaatacaaaaataaagatataaattttccgtttggaattaaaaattgttggacggaaaaagagactaacacctagcagtagaaataataaatctgcaattgggtataaaaatgaaaggaaaacatctcctagtgaaagagcgaatatatttaaatttggttgattaaataaataccattctaatgtgaatatggaagtaagcactatgcatatatcacaaataaagaacgctttttcccatttattgcattcctttaagattttatagcagaaagcgataagacagaaaaatagaaaaaacatgtaaaatacatcagaaaccgtaaaacgatgtattggaatttcgaagaagctatcttgatatgtatatactatttttcctaataaaaaactaccaattgctattgtaatacatatccaaaacggatttgaactgactttcttagaatatatagagtaaatcagtgatacaaatgtaatggcttcaacgacaagtgaagcgaagcgtacatctgaatttgaaaaatgagtagggaatagatagaaaaacataaaatagattgaatagcatattaatgttccgattaatatacataattgtaaatttttatttaatttcaatgaaatcaccttctttaattatgcactatgttcgttatatctatacataataatattatttaagaattgtatcagatttccttataaaaatcatgtttataaggaaagtgttaaagagtgtgagtattcttaaggttaaaaaaatattgcggttgatagtatagactgtatcaagactttaaatagaaattgtatatttagtcatcctttgaattgtaaagtttttttagtgatttgtaagtggagatgcaaaattgcatataaaatgatgagtatctttttttgtgagatttttatttttaatctgaaaattaacatttgtgaaaatgttgagaaaggatgtaaaataagaacgtgtattcttacagagtggaatagtattgccactaaatagggaggcttttttatgatatatcgaattaaagatgcagaaatatactatgaaattgtgggagagggtaaaccggtcattatcatacatggctgcgcccctgaccataggttaatgatgaaatgtatggaatcagtatttcagaaatatgaaggttataagcgaatatatattgatttacctggaatgggaaaatcgaatgctccaaattggataaatagttcagatcgtatagtagaagtgcttatcacatttattgaggaaatcatttctactgaaaaatttttattggtaggagaatcatatggaggctatttagccaaaggtatacttgcaaagatgtttgagagagttagcggattactattagtatgtcctgttgttgtagcggagccagaaaaaaggattcttccagataaacaggtaattgtacaagatgaggaatttttaaatacgctcacttccacagaaagagaggcattttgtgagttagctgtaatagcaaatgaatatacatataagcgatttaaagaagaaattaagcctgggttagatgttgctaatgatgaatttattgaaaggttgcaaaagaattactctcttactatggattttcagcgtaaaaaatatgaaaatcccgttcttttactgactggaagacaagatatatcagtaggttatcaaaatattatagaaattattgaagaatatccaagggcaacattagcagtgttagatatggcaggacataatttgcaaattgagcagcctgaattatttgagagtttagtaggagaatggattagacgaacaaatcagcacagtttataaagtattgtagtattacgcctaagtgttgaaatgggataaatgaacgtgatttattaacttatctcgctattttcctgtaaaagcccgattagtaagggctaattaaagtttcactttataaaaaattttaaggagaaattatgagcacatatatttatatggttagacatggtgaatcaccaaaactagaaggaaatgaaagaatgcgcgggttaactgagaggggacatatggatgcccgtagagtaactgacatattaaaagcggagaggattgatacttttatttcaagtccttataatcgggctgtgctaacgatagaggagtcagctaatttccatgaaaaagaaatagtagtatatgaaaatcttaaagagtgtatgttttcaagtgaggatcaggttatatcagacaaagaggtgtatccacttgtacagaagatgttctctaatccggactttgcacgaacggaaggagagtcatatgcagattgccagagaagagtagtgaaagtattaaaagaaatcttaatggattttcaaggatggaaaattgtaattggtacacatgggcttgtcatgacattaatgatgaactattttgataaacaatatggttttgaatttttaatgaatacgtcaaaaccggatatatataagatggagtttaaagaagaacaattaatgaatgtagagagattatggaaagaggaataaaattagttgcatggattttgttgtaaaagttacttttatagcaaagtcttttttttgaatagaaagcatctttatcaactatttttagaatgttaaataaataagtaattattcagtctttgaataaattatggagaaattggtttagggaaacaattttaaatgtgtcaaaactccaaacgttggatttatattcaataggagaaaaagatgtagaattttgtcttacagtccccgtttacttttcatttcattacatataggctttgtggtgtaagggggacattgcctttacacaaaatctataaggaggtcattgtaatgaaacagattaaaaagtttgcgggagttgctttagcggggacgattggattaagtggactactgtttttagaaccaagtgtaagcgttgcggaagcacagcaagtgagagtggaaaatttcaatacaattgatgtaacgatgaatctaaatgaattgtatgtattaagtggcagaagtattgatattctttctggagataaagaagcaattcagttaaataaatacacaattagttttaataaacctgggaagtatgtgattaaagtaaatggctgtatttatgatgatgtatatacttttattgtaaatgagtagtatatattcttaaattgcgagataaaaacagaaacaccctatttacggtgagagtcgtaaatagggtggatttatttgtattaatctgcactttaaatatgttcactaattttctttttgttatgtaaagtatgtaaaagtgttaacaatgtaaatgaaatatacatcttcacattcaaaaaagttaaaatatttcgttttaaggattataatggagggagaaacataaaagggagtgaatgaacttgaaacaagaacttattgaaagatttacgagatatgtaaaaattgatacgcaatcaaatgaagaaagccatacagtaccaacaacaccaggacaaattgagtttggtaagttattagtggaagagctaaaagaaattggtttaacagaagtaacgatggatgataatggttatgtaatggcaacacttccagctaatacggacaaggatgttcctgtaattggatttttagcccatttagatacagcaacagactttacagggaaaaacgtcaaaccacaaattcatgaaaattttgatggtaatgcaattacgttaaatgaagagctaaatgttgtgttaacaccagagcagttcccggaattaccatcatataaaggacataccattattacaactgatggtacaacacttctaggagcagatgataaagctggtcttacagaaattatggttgcaatgaaccatttaatacataatccgcaaattaagcacgggaaaataagagtagcatttacaccggatgaagaaattggtcgtgggccagcgcattttgatgtagaagcgtttggtgcatcattcgcttatacgatggatggaggtccattaggtggtttagagtatgaaagttttaatgctgcaggtgctaagttaacgtttaacggaacgaatacacatcctggaacagcgaaaaataaaatgcgcaatgctactaaactggctatggagtttaacgggtatttaccagtagaagaggcgccagaatatacagaaggctatgaaggattctatcatttactttctttaaatggtgatgttgagcaaagtaaagcgtattatattattcgagactttgatcgtgaaaattttgaggcgcgtaaaaataacgttaaaaatattgtgaagactatgcaagaaaagtatggcgaagatgcagtcgttttagaaatgaatgatcaatactataacatgcttgaaaaaattgaaccggtgagagaaattgttgatattgcatatgaagcaatgaaaagtttagacattgaaccaaatattcatccgattcgcggaggcacagatggatcacaattatcatatatgggattaccgacgccgaatattttcactggtggtgaaaactatcacggtaaatttgaatatgtttcggtagatactatggaaaaagccgttcaagttattgtggaaattgcaagacgttttgaggagcaagcttaaaaaagaaccaagtagtacgaatgtgctacttggtttttttaatatagtactcgccacaaataaaaagtcgcataagactcccaattagcccagtttgccgcgaaaccttttatttcatttttagtcggtttattttcggaacctgttataaatttaattgcattatgcagaccaacatcatcaattggaaaagctgaaggaaatcttaaacaacgcattaaaacatagttggcagtccatggtcctataccatggatagcggttaattgtttctcagcaacctttacatcttgtgtttgcagtaaatcctcttttgatagttttctctctgtaataagcttcgcaataccgattaaatattcacattttctagtcgtcatttttaattgttggagatcttctacatgtagatttgcaattgtttcaggtgatgggaatatccaatgctttctaccgtcccattctacataactgccaaattgctcaactaatcttctttttagcgtataagcatatgttaagttaatttgttgaccgataattccccaggaaagtgcctcaaataagtctggaatacctaaattacgaaggccataatattgttcaattggtccttgaaggagtaaatcatgtttagctaatgtataaaagggagctaaatcagtagttaaatcaaaccattcttttacatagttagctacagcttcacgtatcgatttttcagatgtatatgattcttctaaacaacgtatttgaatattgccatctgtattcacactaatttcaactaaaggatttacatcttgaacagggataactttataaattttgttatcttcaatatgaaacatacattcattgttagaacgtgatagataacgtaaattttcttggaaacaaaattcttttggaactgctatagataatgcgctattatattctgctgtcatatgaattccacctgtaacttttctaatgtaagcaattttttcttcatttctaatccacccctaaatccggttagtttcccattcttcccaataacgcggtgacaaggaatagtaataaggagagggttagcagcaatagcagaagcaacggcgcgcacagctttaggtttttgaattctttcagcaatttctgtataagaatatgtctttccataaggaatttcacgtaccgtattccaaacagataattgaaaattagttccataagcatcgataggaaatgtaaaagtttctcgcttgttttctaaatactcgataacttcttgcgtatatatttgcaagtaatctggactatgaatcaatatatgttggggcagtttttttctagcccatatatttaattcttcaaagttttcgtcttgtgatccaatgaaacatagtccattttcagttgcagcaatatgaaatcgccaatttttatgtgtaagtagcgtccaatatatataattatttttgtaggaattcattatcgtatccctctttcatctcgttcttttttcgatattcagtaggagtaaagccggttttctttttaaataaagttgcgaaatactctgggttttctatcccgacagcagtactaatttctttaatagattgatttgtgtgtaaaaggtatttggttgctttaagaatcctgaattgttgtatatattctataggagttagccctattattcttttgaaagtacgttgtaaatgaaaagggctaccgtgacacattcccgcaagcatgtcgagagttaaggatttgtcataatgcttttcgatatagtctttaatttgttctacccactcttcattaggtaaagtgatcccatttggcttacaacgtttgcacgggcgaaagttttcacttaatgcttgctctgcatgatgaaaaattcgtacattgtttctatttggtattcttgatttgcatgatggcctgcaaaagattccagttgatttcacagcataaaagaatttgctatcataggaagaatcgttatgaataattgcttgccaatactcatttgttaatgtaactccttcattgtgcaaagaacatcacctctgaaattagtataacctgaataaagtgcgtatgtatgtattcataaatgtaagagcaagattacaaaggtgaaaatatcggatggcgtttagattattttgttgtttcggaaagaatgaaagaccagatgacagaagcgaaaattaatagtgaagtgatgggatcagaccattgtccagttgaattacatataaatttctaaaaaaagaagtatctccctaatattagggagatacttctttttttaattcagtttgttaaaatttttcaaatcattcttgaaataatttcatattaaatatatacttagtaacgataatcattatcagtgaaaatgattatcaagtgatgaagacgtaaaagaattatagtctaggggaagtgaacgtgaatgagttctggataaaattattaatctaatgaaatatatatatggaataagattcatatagttaaattctattgagaatatagtttgaaaatttgagaggagacatataaagatgaacaagaaattatttactttagggatggttaccgttttaagtgtaggtttagcggcatgtaatagtgcggataaaacttcaggcgagcaaaaacaacagacaaaagctacggaaacgaaaaaagatgaaaaacgaaaaattacatatttaggtaaagaatatacagtgccagcaaaagtagataaaattgcgacagctagtttagagtcaatggaagatgcggcagtacttggaattaaaccagttggtgccattactgtaggtggtaaactaccaaaatacctggaaaaagagttagaaggtgcgaaatctgttggtgagaaaatgcaacccaatttcgaaacattactacaattaaaaccagatgtgattacatcaagtacgaaattcccagcagaaacagctgaaaagtttacgaaagtagctcctacattcccggtatcacacgtttcaacaaattgggaagataacttaaagttaatgggagaattaactggtaaaaaagataaagcagaaaaaattattaaagactacaattcagacgctgaaaaagcaaaagcaaaactaggagataagttaaaagataaaaaagtacttgtcattagactaagagcaaacgaattattcctatatccagaaggagtatacttcaaccctgtaatttataaagatcttggactaactgctccagaacaattgaaaactgtaaaagcacaagagaaaatttcatttgaaaaacttgctgaacttaacccagattatattttcttacaatatgaggcaagtgaaaataaaaatccaaaagtgttagaagaaattgaaagtaatccaatttggcaaagtatgaatgctgcgaaggaaaagaaagtatttgtaaacgttgtagatccaatggcgcaaggtggtactgcttggagtaaaactgccttcttaaaagaagcagtgaaaaatttatctaaataatacaataagtaaggtgcgttgaatgatatgcagaaaacaaatgcagtaccagtaactatattatgtatagcacccatactcatcttatttacagttatactttcgattttgtatggggcgaaaagtattgatgctgaaacagtgtggaacgcattatttcattttgattcaagtgatgtaaatcataatattattattacttcacgtttaccaagggtagttgcagctcttttagtcggagcatttctagccatatcaggagcacttatgcaggggatgacaagaaactatcttgcatccccttctattatgggtgtgacggatggtgctgcctttgttattacactttgtataatttttcttccaggaatgtcatcaattggtatggttatatgttcaatgattggttctgcactcggagccggtatcgtgtttggttttggttcgctccttcaaaatggcttatcaccagttaggttagcgattataggaacagttattggaacatttttaagcagtgtatcggctgcaatggcttcgtatttccaaatttctcaaaatgttagtttttggtttaatgcaaagttagatcaagtagatcctaatataattaaaatcacgataccgtttgggataattggaataattttagcattgttaatatcaaaatctattaccattctttcattaggcgaagaggtttctattaatttaggacagcgtacaaaactagttaaagcgatggcaattttatcggtaatttttttaacaggaacagcagttgctttagtggggaaagttggttttgtaggtttaattattccacacattacccgctttataattggggtagattataagtggattttgccatgtgcaggtgttattggtggcgttttcttagcgttatgtgacgttttgagtagatttgtaaactatccatttgaaacacctattggagtcgttacctccttaattggaattcctttcttcctttatttaatccgtactagaggaggagagagacatgcttaaaagttcaagtcaacgtttcggaatgacgatggggattattatatttttaatactatgtgctatctatattagtttaacaaatggtacgttcgacattacgattacagatgtatttaaaacactttttagaattgatccagtaccagaacatgatttagttatttttgagtttcgtcttccgcgtatcgtaattgctggattagtaggattaggccttggtgttgcaggtgctgttattcaagggattacgagaaatggattggcggacccaggtattttaggagtaaatgccggagcgggaacagcgattgtcatttttatgtttttctttcaaggacaattaaaaagcacagactgggtttctattatgatgatgccaatgtttggtttagtaggtggattaggtgcagctatcatcatttatctgttttcttggaaaaacggtaaattagattcgcagcgacttttattaacagggattgcaattggatcgggatttggagctttttctatgtacttatcactcaaaatgaagtcaactgatttcgagatggctgcagtgtgggtgtctggaagcatatatagtgcgaactggaagtatattgtggctatgttaccatggcttattatcttaattccacttatacaaaagaaagcttatttattagatttattccaattggaagaaacgagtattacaagtttaggtgtttcagtagaaagagagaaatcgattttattattaagcagtatcgggcttgtgagtgcatgtgttgctgtttcagggagtatcggttttattggcttaatggcaccgcatatagcgaaaagacttgtcggtattcaacataagtatataattcctacgtgcggcgtaatcggaatgtttcttgtaattgcctcagactttattgcaaaaacagttttcacacctgtagagttaccagttggaatcgttatttctattgtcggtgtaccgtatttcttatatttactttataaggcgaaagcgtaagaggaggaataaaagtgagtattttaagtgcaaaaaatttagaaacaagttatgaaaagcttacagtgtttcgcgatttaaatgtggaaatacaagaaggaaaagtaacgacaattataggtccaaacggttgcggtaaatcgacattgttaaaaacaatgggaagaattttaaaacaaaaaagcggaaaagtatatttgcaagggcaagatttacatacaatttcaacgaaagaaattgcgaagcagttagctttactcccgcaaactccaattgcaccaggtgaacttaaagtggaagaattaatttcttatggacgctatccacatcgaaataacgtaaataagttaacgacaaaagataaagaaatgattgattgggcattaaatataacgaaaacttctgaatttcgaacgagacaaattgcaaatttatcaggtggtcaaagacaaaaggtatggctagcgatggcattagcacaagagacagaagtgttgctattagatgagccaactacataccttgatatgtctcatcaattagatgtattacaaattgtggagaagttaaataaagaacataattgtacggttgttatggtattacatgatatcaaccatgcagcaagattttcagatgaaattattgcaatgaaggaaggagaaattgttacaactggtagcccagaagaaatcattacaaatgaagtattaaaagaagtatttcatattgatgcacgtgtcatgattgatccgtataacggggctcctgtttgtttcggttatgatagcgttgtatctcaagaagaaaaaatcgaaatatatgtaacaagttaaaaagggggggatagggtgaatactacagttgaaaaacagcagattataatatctaatacagaacagtggaaaatgtattcaaaattagaaggtaaggaatatcaaattcatatttcaaagccgaggcaaccagcaccggattcaggatatcctgtcatttacgtattagatggcaatgccttttttcaaacatttcatgaagcagttaaaatacaatcagtaagagcggaaaaaactggtgtttcaccagctgttatagtaggagtgggttatccaattgaaggcgcattttcaggggaagaaagatgttatgattttacgcctagcgtaatttcaaaagatgcccctttaaaaccagacggtaaaccgtggcctaaaacaggaggagcacataatttctttacttttattgaagaagaactgaaaccacaaattgaaaagaattttgagattgataaaggtaagcaaacgttatttgggcattctttaggtggattatttgctctccatatactatttacaaacttaaatgcttttcaaaattattttattagtagtccatctatatggtggaataataaatccgtacttgaaaaagaagagaaccttataaatgaattaaacaatgctaagtttgaaacaggagtgttccttacagttgggtcactagaacgagagcatatggttgtaggtgcaaatgaattatcagagcgccttctccaagtaaaccacgataaacttaaatttaagttttatgaagctgaaggggagaatcatgcatctgttgtgccgacgtctttaagtaaagggttgagatttattagttacatataggaaaaaaggttatggatgaaacattccataaccttttttgatatgtagaattgtcctttttgaaagttttgtttcaacttttcgtctaaagagacaaaaagttgtcacaaaacggtcacaattagcataaacataaaatagacgaaatgaacttatttccaaaaaggctcggtttattccgatcatgatttgtagagctgaaaaagtatggattaaaagttcactatattcccaaggaggtagatcgtatgaaaactattcttgctatcgctggacttatttgggttctatcgcatggcatcccaatttatgaaggagaacaaattcgcagtgctctgaataaaaattttaatgaatatcatatcattgaccggcaagataatgttgtaacagttcgagtaaatgactgttttcatacggtaaccgttgaaggaacttcagtagtgaatgatacaaaagtatgtgatcaacaataattatatatggaaagaaaaaattcttggattaaatatctgaaaattaagattttaatattatagatgaagaataagcgggggcgggtaatccccgcttattcttgtttcactttattgaattttgatgagagatataatgatttttttgacaaaaaggaaagggtatactaaaaattgagattaagaagctaatgcattgttaagaataatcataaagcgtaaatatactcttatggggtatcgtgcgtagatatttaatgctataattggtatactcataaaaacaattgttttattgggtgaagagaaactttaagaaggtgataatatggatcataaagagcatgaagcagtaacacatagatcagaaaaagaaaaagaacagattataaatagattaaagagaattgaaggacaggtccgcggtattcaaaatatgattgaaaatgatcgttattgcgtggatattttagtgcaaatttcagcgattaatgcagcgatgaaaaaagtaggaatgggtgtattaaaaaaccatacaagtcattgtgtttcaggtgctattaaagatggcaatggtgacgaagcaattgaagaattaatgactgtatttgaacgtttttcaaaagcgtaaaaacaagctagtatgtcactggcttgttttttttgtttaccttcataataagatctcggcgtattgatgtgaaaaagtgtgtgtaaaataaacttttagaaaataattgaaaaatcatgatataaaaccattgattaccttaggggggtatggtaagatgtaattgtgattaacaaacaatgaataaacaagaggaggattttaaatggaacagttaacattacaggttgaaggtatgtcttgtggacattgtgtaaatgctatcgaaagcagtgtgaaagagctaaacggtgttgaacaagtgaaggttcaattagcagaaggaactgttgaagttactatcgactcgtctgccgtaacattaaaagatatcgttgctgtaatcgaagaccaaggatacgatgttcaataattatttttagatatggaaataaatcgtactttaaatgaagtacgatttattttgctaataattatacctcataagggtatatagaggtgagagacatgaatgaaaaaaaagaggccaatcttcaaatatcaggaatgacatgtgtggcatgtgcaaatagaattgaaaaaggtctaaaaaaagtagaaggtgttcatgaggcgaatgtaaattttgcacttgaaaaaacaaaaataatgtacgatccaactaaaacaaatccgcaacagtttaaagaaaaagttgaatcgttaggatatggaattgtaagtgataaagctgaatttactgtttcaggaatgacatgtgcagcatgtgcaaatagagttgaaaagcgcttaaataagttagatggtgtgaacaaagcgacagtaaattttgctttagaatcagctacagtagactttaatcctgatgaagttaatgtaaatgaaatgaagagtgcgattacgaagctaggatataaattagaagtgaaaccagataatcaagatgcatcaactgatcatcgattacaagaaattgaaagacaaaagaagaagtttattatttcgtttattttatctttcccattattgtgggcaatggttagtcatttctcatttacgtcgtttatttatttaccggatatgttaatgagcccttgggtgcaactagcacttgcaacccctgttcaatttatcattggtggacagttttatgttggagcttataaagcgttacgtaataaaagtgcgaatatggatgttctcgtggcacttggaacgtcggccgcgtatttctatagtgtatatttaagtattcaatctattggttcttcgaaacatatgacagatttatattttgaaacgagtgcggtacttattacattaattattttaggtaaattatttgaagcgaaagcaaaagggcgctcatcagaagcaattaaaaaattgatgggtttacaagcgaagacagctacagttgtgcgagatggaacagaaataaaaattttgattgaagaagtagtagctggtgatatcgtctatgtaaagcctggtgaaaaaataccagtagatggtgagattgtagaaggaaagtcagcaattgatgaatcgatgttaacgggtgaaagtattcctgttgataagtcaattggggatgtagtaataggttcgacaataaataaaaatggatttttaaaagtgaaagcaactaaagtaggaagagatactgcattagctcaaattattaaagtagtagaagaggcacaaggttcaaaagctcctattcaaagggtagcagatcaaatttcaggtattttcgtaccggttgtagttgtgattgcgattatcacatttgcagtatggatgatatttgttacacctggtgattttggcggagcacttgagaaaatgatagcagtacttgttatcgcttgtccatgtgcattaggtcttgcaacgcctacatctattatggcaggatcaggaagatcagcagagtatggtattttatttaaaggtggagagcatttagaagcaacgcaccgattagatacggttattttagataaaacgggtacagtgacaaatgggaagccggtgttaacagatgtaattgtagcagatggattcaatgaaaatgaactgcttagattagtaggggcagcagaaagaaattctgaacatccacttgcagaagcgattgtagaaggaattaaagaaaagaaaattgatatcccaagttcagaaacgtttgaagcgattccgggatttggtatcgaatcagttgtagaaggaaaacacttattaattggtacacgtcgattaatgaagaaattcaatattgatattgaagaagtttctaaatcaatggaagcgcaagaacgagaaggaaaaacagcaatgcttattgcaatcgataaagaatatgctggtatagttgccgttgcagatactgtaaaagatacttcaaaagcagctatcgcaagactgaaaaaaatgggtctagacgttgtgatgattacaggagataatacacaaactgctcaggcaattgcaaagcaagttggtattgatcacgtaattgcagaagtattgccagaaggaaaagcagaagaagtgaaaaaactgcaagcaaatggtaagaaagtagcgatggttggagacgggataaatgatgctcctgctcttgctacagcgaacattggtatggcaattggaacgggaacggatgtagcgatggaagcagcggatataacgttaatccgcggtgacttaaatagtattgctgatgcgatctttatgagtaaaatgacgataagaaatattaaacaaaatttattctgggcattagcttataacgcgttaggaattccaattgcggcattaggtttcttagccccttgggttgctggagcagcgatggcatttagttctgtatccgttgtattaaatgcattacgattacaaagagttaaattaaaatcttaaagagctacattaagtaattgaatagaattaaaaaacaatactttgaataagtattgttttttttgttcgtatagaaattaaaacgatataataaagtagaaatatagaatcgtatgtagtagaaaagttaagaggtagtttcgtaaggagacttatatatgttaaaagatattataattagaacattccagaaagaagatttagatcaagtattacaattgttctatgaaacagttcatacggttaatgcaaaagattataatgagttacagctacaggcgtgggcaccggagcaactagatagagaaaattggttacagtctttagaaaagaatattagctatgtagcggatcataaaggtgtgattgtggggtttggggattataacgatgatcgttacgtagatcgtttatttacgcataaagattatcaagggaaaagagtcgcttcatacatactacagaagttagaaaaagaagcagtgaacctagggcatagggagatatatacagaggcgagcattaccgcaaaacctttttttgaaagtaaaggttttatttgcataaaagaacaaaagaaacaacataatggtcagatttttattaattatgttatgaaaaaaatatccttctcataaatgagaaggatatttttcattattttacagcttcttttagttctttaccagctttgaaagcaggtactttagaagctgcgatttgcatttcttcaccagtttgtgggttacggcctgtacgagcagctctttcacgaacttcgaatgtaccgaatccgataagttgtactttttcaccagcagctaaagtgttagtgattgattctactacagtttgtacaactacagtagcttctttttgagaaatctcagcattttgtgctacgtttttaattaattctgttttgttcatgtttttcacctcatatgtaaataatgctatttaagttgttattataacgtataaaacattcgagaacaagtgtacgtacatatattcgcaaaaaaaatgaaatttgtaatattttttagggcactttatagacattccatttaagcggacagagatttgttcttcatttcagtcttctcttgatgagcaggtagtttcttattataagatatgaagtaaggtagtgctacaaataacatacctcctactaaatttccaaagaaaacaaaaataaagtttggaaaatattcagcccaagtgaaatgaccggcaaaaatggcggctgggatgacaaacatattggctacaacgtgttgaaatccaatcgcaacaaaagtcataaccgggaaccaaataccgataatctttccgataaattctttacttcccatactgagccaaacagctaaacaaacgagccaattacatccgattgcagaaataaatgcttgcaatggtgtatcttgtagtttcgcttgagcgatagaaatagtttttgctaaaaaagctccttcagttaagccaacgatatgaccgaaaaagtaggctacaaatacagcccctatgaaattgctaaatgtaacaataactaaatttcgtatgaaataaaataaagtaattttcttttgaagccaggccatagaaactgtcatcatgttaccagttactagttcaccgcctgcaagaataacgagaataaggccaatagggaatacagcagcgcctagaaaactagtaaatgatccccaagcctttggcattgttccaataacatgaatatcgagtaaataccctaatgctataaaagcaccgccaaaaaaaccgagaattaacatagggagtaatgataaatgagctttttttcttccggaattagcagcaagttccgtaatttcttctggtgtaaatacagacatgaataacccctccgtaataaaatgatggaatgaatagaaaaaatttcgaaaatctatgtattataaaaatatgttatgacttctgtataaaattgtcaaagtgaatagagagggaattacatattgataacattgttcatgttgtcacatgaatgtaacaataaggatttaaagtgtttctagaggtgaaaacatgaatacgaatcatgtaaaaaaagaacgaaaaaaatcaatcgtaaagatatttattattagttttataagtatattaatgataccagtaagtttgtattattatgcgacagaaatagaacgaaaactagtaacagttacgtggaatgaaatagaagcttctacaattcctaaagagtttaataataaaaaaatattgcagttttcagatgtacatttaggaccagagtttacactgaaacaacttgaacatttagtggagaagatgaatgaattacatccagatatagtagtttttaccggagatttaatagataaatttgggtcttatagtgcggaaagagaagaagcgaaggttattttgcagaaaatttacgctcccttagggaaatatgctgtgtttgggaatcatgataggggcgggggcggtagtttattttacaaaaaatatatggaagaagctggtttttctgtattagtaaatgaagtgcagaaaattaaagtggaaaacggcaaatatattataatatcaggtttggatgattttctattagggaagccgcaaatagattcaactttaaaaaacttgaaacaaaatgatttcaacatgttattagtacatgagccggatgttgtaaccaaaataaatcgttacccagttgatcttcaactgtcaggacatagtcacggaggacaagtccaaattccttttgtaggtccgttaattactaccaaactagctgagcactacgttgaaggtatgtatgaagtagaggggaagagtaagccgttatatttatatgtaaatcgtggcattgggactactaggatgcctgttagattttgtagtgtacctgagctttcaatttttgtgttgaagcaaaatagtaactagaatatttaacaatatgattccaaggaacgtgcgatgttggtcgatggaaaagagtttcttaaaactttagatgtgacaaagtaattttcataagtaaaaaacaacaataggacctataaagggacctattgttgtttttatcctgcattgattgcccataaatgtccgattgatgagggctaattatagttttactttgttatttttgcaaggaaagaccatcaaaatatgttctatagttactagagaattcaaagttgttttttgcatcccaattaatagaccaagacattaggccgcggaatgcaggatagccactctggttagaaagtttatactttcctccgaatggaactcctttaatgatataatttaaagcttttttcatttcagttggcgaaatgtatccaccacttggagctgccgctggtgctgctggaagcccaatcatgacttgatctgaacgaagagctgggaaaatgttatttgcattaccacctacaggaaaaccatgtaagagcatatctgccatagcgacctcgtagtctgcagtaccttgattgtagttattaccgtccattccaatcccgctaccagcgttgtagtgttgaacgtgaatgtatgttagtttatctttcactccataaataattggtaaatatgcaccccatatgcttccatatgcgctatatccgccttgaacataagctgtttcaggggccatgcttaatagaaaatctggaccataatgatctgagattgttcgaatagctgaaataagatttacgatttgaggggtagttgggtttttgaagttagtgtcatttccgtttaagtaaatacctgattcaaggtcaatatctattccgtcaaaaccgtatttatcgatcagagattgtatggaattaataaaacgatccttagcggcattgtcaggaagtaaaacgaccccattttgtccacctattgaaagaactattttctttcctttactttttaaataagaaatatctgatttgaattctgcatctgtaccatacacaggagaaaattcaacagtggaacgatcaccaccagtttcaccaaaagatacattgattacatcccattttggtgaaacgtcttttaatttaataatgccagtaccgttatcaaaattatgccagtatccaacgagtaattttgaacctaaattgtttgctgcttgtgcttggaaaggggataacggtagaagtaagaacattactaaaatacaacaaaaaaatttgaacttgtttaacatatcaacactcctatacaaaaagttgtctagatgtataatcttgtttatttaataatatctgaaaattctttcttttgtaaagggactataattttctcaacaattgtgtatgggaaagtattaaacctaatgtaataatttttgaaggaggttgaattttaattgttgaattcagaatattttgatatattttaaagtataggacaaaatctttcgcacagtactcttacataaatttcaaaatttagtttggaaggggatgtacaagatttggataaaaatctaaagaaagacctcaaaatacgccacattacaatgatttcaattggcggtgtaataggggctggtttgtttgttggaagtggtgcagttgtacattcggcaggaccaggttctatcgtttcatatgcattagcaggacttctagtcattttcgtcatgagaatgctaggagaaatggcagctgttaatccgacaagtggttcatttgcaacgtatgcaagagaagcgattggtccttgggcgggttatacaataggctggttatactggtttttttgggtaattgttattgcaatagaagccacagcaggtgctggtattatccaatattggattccacaaataccgctttggttattaagtttaatattaacaattttattaacgctgacgaacgttttttcggtgaaatcatttggagagtttgaatattggttttcttttattaaagtaataagtattgttttgttcctttgtctaggtcttgctgttattttaggatttgttccaggaacagaagcacccggcacttcgaatttaattggacaaggtggatttatgccaaacggtataagttcggtactgcttggaattactgtcgttatattttcatttatgggatcagaaattgtagcggtagccgcaggtgaatctgcagaacctgtaaaagcagtaaaaacagcaacaaacagtgtgatttggcgtattcttgtattttttattgggtctatagcggtagttgttacgctactgccatggaattcagcaaacatattaaaaagtccatttgtagctgtattggaacatataggaataccagctgcggcacaaattatgaattttatcgttttaacagctgtactctcttgtttaaattcgggtttatatacaaactcaagaatgcttttttcgatggcagaaagaggagatgctccaaaggcgtttttgaaattgaacagtagtggtgttccagttcgggccgttttatttggaactttcttcgcttatattggcgttgtgtttagttacatttctccagataaagtctttttgtttttagtgaatgcatctggcgggattgcgttactagtttatctcgttattgcagtttcgcatttaaagatgcgtaaaaaaatggggaaagtggaacaacaaaatttgaaagtgaaaatgtggctttttccgtatgtaacgtatgttacaattgttgctattatagcagttttagttgcgatgttcgcaattgatactttacgttcacaagcacttttaacaatgtttgttactgttcttatcatactttcttattttatttttaatagaaataaaaatagcacagttttgaatcctaaaagtaagaatgaggaatctgttcgattctaattttcgaagagagttacacccagtcattgctataaaagaatcatatataatcatagaaacaagtaattactattgtcatagtggatataaacttttttcttgactttttatacgaaggcgagcaaaatggtaaaaaaggaaggggggggatgataatggaagagtacgtattagagctgtataacctgttatatacgacagaatggcaagatattgtttcgtttctaggaatcgtattttgcatgaaaattgtaattgtatatatggaagagcaaggtatgttctattccttctcatccccgttcgatatgcagcgcgagccgttgctaaactatgccaatgtgaattacgaacaaattccttttgttattttctttatgattcgatttattacagcaattgtaaggaaaaaggaaagtgacgatgaagagtgccactcaacttgtaatatagcgaatgttttttaagctaaatacaaggaggagatttatatgtggtttcgatttcttatgattggtttcttttcattaacagcaatttctttaatgggatatcaagtgtctgaaatttttcaagcatatagcgatacattttttaacaaaaactaatcgcgttgctatttgaataataaagcgataaaatccttcttaagaagttttattaagaaggattttttctttgtcttatcttgctgtgtcaaactattgtcacatttacactgtgaatagtatgttaaaatagtgaggttacgtatacatatttgaaggaagagggagtgaccattttggtggatcaatcaacaaatcagaaaagctatgctcctattgtgataacgctttctgtaattgtaaatgcgattattttatttttgttctttggacctgttggctatgaaggagaattacattttgatgtaacaattttaccaatgttaaatgcaatttttaatagctttacgttcgtattcttattagcagctctatactctattattaagaagaatgtgaaaatgcaccgtggtttcatcctggcagcatttacaacgacgttgctattttgtgtttcttatttatcttatcattacttagcgccagcaacacattttggcggagaaggattcattaaatatgtgtatttcatcattttaattacacatattatcctggcggcaattattgtaccgcttgcattgtttgcacttgtatttggttttacaaatcaattaacacgtcatcgtaaaattgtacgttggacgatgccgatttggttatatgtaagtttatctggtgttattgtttacttaatgatctcaccttattaccaataaaaaatctcagcctgtaggctgggatttttttattaagcaaatatttttgtgaaatgaaaaaaatatggtatacaaaagtatagttgcttttcatatagaagggatggtaaaggaatatgcaaaattttgtatttcgtaatccaacgaaacttattttcggtaaaggtcaattagagcagttaaaaactgaaattccacagttcggtaaaaaagttcttctcgtatacgggggaggcagcattaaaagaaacggtatttatgataatgtaatttctattttaaaggatataaatgcagaagtatttgaattgacaggtgttgaaccgaatccacgtgtatcaactgtaaagaaagggattcaaatttgtaaagaaaatggtgttgaatttattttagcagttggtggaggaagtgtgatcgactgtacgaaggcaattgcagctggtagtaagtacgatggagatgtatgggatattgtaacgaaaaaaacatttgctaatgaggcattaccatttggtactgtacttactcttgcagcaacaggatctgaaatgaatgcaggctcggtaattacaaactgggaaacgaatgaaaagtatggatggggtagcccggttactttcccgcagttttcaattttagatccagttcatactacttctgtaccgaaagatcaaacaatttacggtatggtagatattatgtcgcacgtattagaacaatatttccatcatggaacgaatacagaactacaagatcgttattgtgaagctgttttaaaaacagtaattgagacagcacctaagcttttaagtgatttagaaaattatgagcatagagaaactattttatattgtggtactatggcgttaaacggcattttagcgatgggagtaaaaggagattgggcgactcataatattgagcatgcagtttctgctgttcatgatataccacacgggggtggccttgcgattttattcccgaactggatgaaacatgttgtagaggaaaatgtaagtcgttttaaacagttcgctattcgtgtatttgatatagaaacagatggcaaaacagataaagaagtggctttagaaggaattaaggcgctgcgtcaattttggacttcaattgaagcgccagcaacattagctgattacggtattggagaaaatgaaattgatataatggctaataaagcgatggcgtatggtgaatttggtaactttaaaaaattaaataaagatgatgttttaagtatatataaagcttctttataagtgaatttagaaaagaaacctatttgattgtttaatcgaataggtttctttttactgtttataaatgtttatgggtgttttttgattatttttgattgtttgtggttgatttttgtgaccgttttcattatactgtaatcaaagaagaggtgaataaaatgttaactcctgaacgtcatcaaatgatattgcaacttgtaaaagaacagaaagttgtaaaattacagcaattagttgaaagaacagaaagctctgagtcgacaattcgccgtgatttagcacaattggaaaagcaaaggttattaaaaagagttcatggtggtgccgctgttttaacaggaaaagggcaagaaccaacgatggttgaaaaatcatccaaaaacattcaaataaaacaacaaattgctaattatgcggctagcgttattgaacaaggtgattgtatttatttagatgcaggaagtacaacatttgaaatgattccatttttaataaataaagatgtgactgtcgttacgaatggacttatgcatattgaagctttagttgaaaataatattcgtgcgtatttactaggtggaatgatgaagagtaggacgaaagctttaatcggtgctatggcacaggaaagtatgcagaagtatcgttttgataaatgttttttaggtgcaaatggtgtacatgaacagcttggctttacaacgccagatccagaagaagcgctcttaaaacaaatggcattaacattagcaaacgaaggatatttcttaattgatgaaagtaagttttcagaagttgcatttgcgaaaattgcaaatgttgaagaagcaaatattattacaaaccatttagaaattgatttagaaaaatataaaagacaaaccaatgtaattgaggctgataaacaatgatctatacagttactttaaacccatctattgattatgtagtacaagttaattcctttgatttaggcgcagtcaatcgagcagagaaagatatgaagtttcctggaggaaaagggattaatgtttctcgcgttctccatcgtttaggtgtggaaaatatagcacttggatttactggtggattcaccggtcaatttattaaaggtgtattacaggcggaaggcgtaatgacaaacttcatccaagtagacggagattcccgaattaatgtgaaaataaaaggacaagaagagacagaattaaatgggcaaggtcctaatgtgacaaatgagcaatttgaacaattaatgaaacaaatcgaaagtatgaagcagggagattgcgttgtgctagctggaagtgtacctgcatctatcccaactaccttttatgaatcaatcgcagcgctcggagctgaaaaaggtattcgagtagtagtcgatgcgagtggaagtgcactgcagcatgtaattaaaaataagccatttttaattaagccaaaccatcatgaacttggtgagttgtttggagtggagctttcaacagtagaggacgttttaccttatggaagaaaattaattgaacaaggtataaaacacgttatcgtatcgatggctgaagagggagctttattatttacggcagaaggtatatatgaagcgactgttccaaaaggtgttgtaattaattcagttggggccggagattctcttgttgcagggtttgtaggcaaatatgaacagacaaaagatattgaaaaggcatttcaatacggcgttgcaacagggagtgcaacagcattttcagctgatttatgtaagaaggaaaaagtagaagaattattgtcgcaagtaattgtagctaagcgatagggggaagcaacatatgaaaattacagaactattaaaaagagatacagtcattatggatttgacagcttcaaataaagaagctgtcatagatgaattagttgagaaattaaatggggcaaatcgtttaaatagtaaaatggaatttaaagaagctattttaaagcgggagtcccaaagtacgactggaataggggaaggtattgcaatacctcatgcgaagacaaaggctgttaaacaaccatcgatttgttttggtagaagtgtaagcggtatcaattatgagtcgcttgacggacagccagcacacttattctttatgattgctgcaagtgaaggagcgaataatactcatttagaaacgttgtctcgtttatcgacattattaatggatgaagggtttcgcaagcaactattagaagcaaaggatgaaagtgagcttcttcaactatttgatgaaaaagagaatgaaaaagaagaagagattgaagtcgccaaaccagaaggaaatgaaccgtacgtattggcagttacggcttgcccaactggaatcgctcacacgtatatggccgcagatagcttgaaagcaaaagcagcagagctaggaatcgcaattaaagttgaaacgaacggatcaacaggtataaaaaacggtttaacaaaagaagacattgaacgagcaacagctattattgttgcggcggataaacaagtagaaatgaatcgttttgctggtaaacatgtcattcaagtaccagtcgctgatgggattagaaaaacggaaacacttcttaatcgagctgtaaagcaagatgcaccaatctttaaaggtgtaaaagaagatggaaaggcagaaagtacggaaaaagaaaaaggattaggaatttataagcatttaatgaatggcgtaagtaatatgcttccgttcgttgttggcggcgggattttaatagcgctagcgttttcgtttggtggtataaaggcggaaggtcctttagctgaattgttcatgtcaattggtggaggaaaaacaggtgcgtttttattccttgtaccaattttagctggatttattgcaagttctattgctgatcgtcctggttttatgcctggtgttgtaggtggatttttagcggcgaatgcgaatgctggctttttaggtggattaattgctggtttcttagctggatatgttgttttagggttgaaaagattattttcaggactaccagtacaattagaaggaattaaacctgttttgttatatccagtctttggattattgattacaggagttgtaatgcaaaaagcagtgattccgcctgtagtagcattaaatgaaatgttgacagggtggttaaatggtttaaacggtacgaatgctatattactaggtcttattttaggtggtatgatggcaattgatatgggtggtccaattaataaagcggcgtttacgtttggtattgctgcaatagaagcacagaattttggagtgcactcagcagttatggctggtggtatggtaccgccacttgcgattgcatttgcaactacattctttaaatcaaagtttacagaagcggaacgtaaatctggtttaacaaattatattatgggagcatcgttcattacagaaggtgcgattccgtttgcagctgcagatccggttcgagtaatcgtaagttgtgttgttggttcaagtattgcaggtgcgttatctatgttattccaaattacattaccagcaccgcatggtggattatttgtaatagcgttagtaaataaaccgttactatatattttctctatattaattggaacgattgtctcggccattatgctaggtgtttggaaaaagaaagttcaataacaaataaaaagagagcagcttttagtagctgctctctttttattacaaaaaaataggttaacaattaaatattgatgttttttggtaaaagatgtaacgaattgtgaattttttgtaacaaaaaagtaacactgtaattttttctggaaaaaagttcttgtgctcgtatatgaaaaatatatgaaaaccactggagattgtatgagaaatacattttattaatatggaaatttatgttacaactcgttaatcgtatattacgaatgctttgtaattgtgtgatttctaaaaattctaaaaatctgttgctataatgaaaatacgaaaacaaagcaaatggaggctattcatgaaaaaattattaggtatagcaacagcagcagtttttggtcttgggatttttgcgggttctgctaaagcggaaacaattgtaacaacagacgtattaaatgttagagaaaacccaaatgtagagtcaaagcttgtaggtaaagtgttaagtgggaatacactagatgttataaatacagaaaatggatggacaaaaattaagttgaacggtaaggaagcgtttgtaagtgccgattttacaaagagcacatattatgtaacggcgggcgtattaaatgttcgtgctggagcgaatactgattctgaaattttaggtaaacttaataaaaatgatgtgattgaaacgacgaatcaagttcaaaatgaatggttacaattcgactacaatggaaaagttggatatgttcacgtgccatttttaacaggaacagcacctgtaatcgaaaagaaagaggttgtagctcaagaagaagcgccagctagaacaaatacgccggttaaaaataatacagtagttaagaataaagagtctgttaagagtaacgattctattaagaatgtagaatcaagtaaacctgtggtaaaagaaaaaccggctgcaaaaccagttgcaaaatctactgaaacaagtgcgcctactggtggtcgtgaaattacagtagaagcgacggcatatacagcagatccgagtgagaatggttcgtatggtggtcgtgtattaactgcaatggggcatgatttaacagcaaatccaaatatgaaagtaattgctgttgatccgaaagtaattccgcttggatcaaaagtatgggtagaaggatatggagaagcgattgctggagacactggtggtgcgattaaaggaaatcgtattgatgtattagtcggttcagatggtagtgctaatagctgggggcgtaaatctgtaaaagtgaaagttatacaataggttatcgatattaatataaaaagcggttgcttgaaattatgtaagcagccgctttttatggattattgaaatggataaatagttttacctgtaataattttatatgcactgcaaaattgcgtttgtatatattctgtatttttattttctggatgtaatgttgtttcatggagggtagaatgaaaagcccgtagtaaacaatttagggcgaagtataattcctcttgtgaacaattttgttcttttatagaagtagctaaaatgaggtcttttgtcaaagatgaaaaattgatggtggattgtttcatagttaactcatcctctcgaaactatttttatcatgtatatgcagaattggacaaactatgttcttttttctgtgtaatttcatgtaccgaaatgaaagaacttgcaatcatgccgttaaaattggtaagattgggtataatcaatagatggagtatattacataaagagagttgaataatatgggagaagtgcaacgtgaaaaagttgctgtcatcattggaccaactgctgttggaaagacgaagttaagtatcgatcttgccaaagcgttgaacggtgaaattattagtggtgattccatgcagatctatcgaacgatggatattggaactgcaaaggtaacaaaagcagagatggacggaattccacattatatgatcgatataaaaaatccggaagattcattttctgtcgcggaatttcaagaacgtgttcgcaagcatattcgagaaattacagaacgtggtaaattaccaattatagttggtgggaccggtctttatatacaatctgttttattcgattatcagtttacagatgatgctggtgatgtgatataccgagagcaaatggaaaagttagctttagaacgcggtgtggaatatgtacataaaaaattgcaagaagtagatccagaaagtgcggagcgtattcacgcaaataatgtacgacgtgtcattcgggcgttagaaattttccacacgtcgggtgaaaaaatgagtgaacaaattgagaaacaagaaaaagagttactctatgatgtttcattaattggcttgacaatggatcgagaaatgctatacgatcgcattaacttacgagtggatttgatgatggaacaaggcctattagaggaagtagaagggctgtataatagagggatacgagattgtcaatctattcaagcgattggatataaagaaatctatgattattttgagaatcgagtttctttagaagatgcggtatcacaattaaagacgaattcgcgtcgttatgcaaagcgtcaattaacgtggttccgtaataaaatggatgtcacgtggtttgatgttacaaacggtgaaaaaacgtcagaaattttacgatacatagaaggaaagttacaagtaaagtcgaataatagtaagtagagaaaaagaggaggattcgacatgaagcaatcaatcaatattcaagatcagtttttaaatcaactccgtaaagaaaatacgtttgttacgctgtacttattaaatggtttccagcttcgtggactaattaaaggatttgataattttacagtcctgctggaaacagaaggtaagcaacagcttatttataaacatgcaatttctacatttgtaccacaaaaaaatgtttcaattgaattagaatagtaatgaattattgtacataacaaaaaagagcgagtttcctcgctctttttttatttgtcataaacaatatatagtgaaatttaagcgattctaaatacagtaaggcggatgttagtatttcctgttgcagggatcgtaatctcattaagtgtagattggacagagattcttgcaccagctgctaatgtttctattgtagtaaatgaaagtgagtcgcctattaaatttgaagagaaattatcagttgcgactgctccattaattgaaattcctactccgagtggagcgcatcctggcgcagttgtagaaatggatacgctaattacataaataccaccgttaataacagtaactgtatctgtgccgttgaagataatattgtttacgttaattgcagtactaaaaataaaattattaaattgcagtactgtttgctgaatattgtttgttacaacaattgttgctatagggaagctaggtccagtaggcccagtaggtccggtaggtccaccagaaggtccagtaggtccagtaactcctatgccagtagcgccggtagcacccgttggtccttgaatgccttgaggcccggtagcgcctgtgttaccttgaacaccttgaggtccagtggcaccagtagcgccttttacaggtctctcatgaaagtaaaaaaattaagtttaaacatactatacgaggagtggaagaaatggaaaagaaaacaatgggaatccatcatattacagcgattgtagggcatccacaagaaaatgtagacttttatgctggtgtattggggttacgtttagtgaaacaaacagtgaattttgatgatccaggtacgtaccatctttattttggaaatgaaggaggaaagcctggaacaattattacgtttttcccatgggcaggtgctcgtcaaggtattattggagatggtcaagtaggaattacgtcttacgttgtaccaaaaggtgcaatggagttttgggaaaatagattagaaaaattcgatgtttcgtatacaaaaatgactcgttttggagagcagtatttagaatttgatgatccgcatggtttgcatatagaattagttgaaagagaaaaaggcgaattaaataattggagttttggagaagttacaccagaagtagcaattaaagggtttggaggtgctgttcttttatctacacagcctcaaaaaacagctgaattgttagaacatattatgggtcttgagaaaattggagaagagggtgaatttgttcgattccgttcttctgctgacattggaaatattattgatttgaaattatcaacaatcggtcgtggccaaatgggcgttggcacagttcatcatattgcctggagagcgagtgacgatgctgatcagctagactggaaagagcatgtgtcgcgttttggatatcacgtaactcctgtacaagatcgaaattattttaacgcgatttattttagagaacatggtgaaatcttatttgaaattgcaacagatcctcctggtttcgctcatgatgaatcgttagagacgatgggtgaggaattaaagttaccggaacaatatgaacaacatagaaaacagattgaacaaacgcttttaccatttgaagtgagaaatttagattaaagtgattgaagggggaaaaggattatgatgaaacatgtttttcaaaaaggaaaagatacgtcaaaaccagtgttgttattacttcatggcacaggtggtaatgaattagatttactaccacttgcagaaatagttgatccggaagcgtcggtattaagcgttaggggaaatgtgttagagaatgggatgccgcgtttcttccgccgattagcagagggcatttttgatgaagaggatttaattttccgtacgaaggaattaaatgaatttttagatgaagcggctaaagaatataaattcgatagaaataacattgtagctatcggttattcgaatggggcaaatatcgcagcaagcttattattccattacgaaaatgcattgaaaggtgctgtgcttcatcacccaatggtaccaagaagaggaatgcaattagcaaatttagcagggaaatctgtgtttattgctgctgggacaaatgacccaatttgttcatcagcagagtcagaggaattgaagatactattagaaaatgcaaacgcgaatgtaacaatgcattgggaaaatcgagggcatcaattaacgatgggtgaagtagaaaaagcaaaagagtggtatgacaaagtattttaaaaaagaagcatctgctaaccattagcagatgcttcttttttatttaggactggattgcaagatgagatgaagaaagtggtagctcaatatcaacaattgtacctttatttaattcgcttgaaatgtgtaatttaccatgatgttcttcaattattttgtaacacatcattaatcctagtcctgtgcctttttcttttaaactataaaaaggttcgcctagacgggagatacgatcttctggaatgccacaaccttcatcgataattcgtattaagatgaaattatcctctaatggttttgtttggatgaaaatatttccgccatttggcatcgcttctatcgcattttttaatatgtttataaaaacttgttttaattggttaccgtcacattgaatatcatatacgtaatcaaaatgatccatgatgatatgaacgctatgcataattgcagtcggtaaaataaatgtaactacctcttcaattaaagtttgtatgttacaagtttggatagataatacttgtggcttagacatcgccataaattgactcgtgatggattccatttgtgaaatctcacttaacataacatcgatataccatttttgctcctcatttatttcagggaggagcaatgttagaaaaccctttagggaagtgagtggatttcgaatttcatgggcaattccagctgtcagttgtccgactactgcgagcttctcagattttcgtagtaacttttcagtttcttttagctctgtaacatctctccccatcacgataagacctttgcgagaaccattaggatgataaagcggaacttttgatatacttaagattaaatcgaaatcatctctatgtataataaattcctcgccatgaagaatttgtctttgttgccatgctagttcatcgacttcttcacaatgtaaaaaagcttctcggtatgcttcattatattgaatgagttcgctatcttttttcccgtggtaaggtacatgatggaagttgaagcaagaaagtgcgtagtcatttgcctcaagccagcgcccttcatgatctttaaatataacaaacgcaggcatggagtttactaatgtacgtaatctcttcttactttcttttagcatattctcaattctttctgatttttcaagtggcttcataatagcgtatacaccagtaagacgattttgaacaaaaataggaactagttttgtcacaacatctaataagaatccatttttatgataaatagataagatatactcttgttgattatccgcttcagtattctttatattttgtaatacttgctcagaaatatgggctcctaaaatagaggtaatatttttctgttctaattctaaagaagtgtaacctaatattctttcggcagaaggatttatatgtagaataactccttctaagtttaatgaaataatactatcaggattatgttcgaacagagatgcgtacatttctgttaatgaacgatcttgtatatggtttcgcaaacgtctagaaatgttcggatgacgttttttttgagttggtgaatattttttacgactcataatagttcctccgtacaaatagcatctaaaaagatttgtctattcataactataatatagatgtgatgtgtatttctataaaaaatggaagttatagaataaattttatttttttattttttttgcaaagtgaatgcaggatggtaataaggggagcttatattgttttataacccttttgtaagttacagacggctgttttccgtataacattagggtagaggagggggagagaaaatgaaaaattatattcaagggattgatcacgtgcaagtagctgcacctgtagagtgtgaagaagaggcgcgtgatttttatgggaataaaattggtatggtagaaattccaaagccagaagagttgaaaaaacgaggtggatgttggtttaaatgtggaaatcaagaaatccatattggtgtcgagcggaactttacaccagctaaaaaggctcatccagctttttatgtgaatgaagttaatgaatttaagcaaacacttatagagaaaggtgtaaaagtgattgatgattatgcacggccagatgtaattcgattttacgtatcagacccgtttggaaacagaattgaatttatgcaaaataaagactaggtgtattcccacctagtctttaacttcttctgaaaagtcctaacacttctacagtttctgtaatattaacgaatgcattcgggtcaatttcagaaattgtaagtttcatacttgctaattcttcacgagaaacgaccgtcataagtacacgctttttctcgcttgaataagcgccttcgccatcaagtaacgttattccacgtacaacagttgaaagaagctgttttttcattttttctgcttcatttgttacaatcataagtgtaactttacgatgttttgtatgaacagcatcaattactttaccagttacataaattgaaagtaagcttgtaagtgcaacatcccaggtgaagaagaatcctgcgattattacaacgactgcatttaaaataataaggaatccgccaagtttaatgtctcgcttgcgggataaaagcataccgataatatcaaatccaccagtggatccattacagttaaaaacaagaccaataccagctccggcgatgacacccccgaagatagaagataacaatggatctgttgctacgacttttactggaacgtagtataatgcaacagataatacaactacagagacaactgtgttaaaaatcactttttttccaaggcctatgtaccctaaaataaggataggtaagtttaatacaaagttaataatgcctgtgtttacaggggttacaatccctaaaataatagcaattccgccaattccactacttaaaattttgtgggggataaggaaaagattaaaggcaaccgcaataataatagaaccgataataacaccaaggaatctgaccatttctttcccgtccttcactgaaaaattcatattatttcaagattatatatgatattgaaagttttgggtaaaaacagtttattttggtaaattagattaatcgaaagaatttgagtattttatcatttgaaaggggatacagttgtgaagataaaaacatatcaacagaaaagcccgttgaagcaagaatgtgaggattcttatttttgtaataaagataaaaagatttatggtgtatgtgacggtgcaacaccacttgtcccgtttcgtgatgaaaatggacataatggagcatacatcgcttcgcatttatttgcaaattattttactgcattacgagagaatcatagtttacaatttgcagttaccaaagcaaatgaagcattacaaagcaaaatgttagaatatgaagtagacacgagaaaaaaagagcatttgtggtgcacatgtatcgcggcagttcaaatagttggtgagaaaattgaatatgcgcagcttggggactgtatgattgtcgcaacttttcaaaatggaacgatgcaagtattaacgaaagacacagttgaaggaattagtaaacgagcaaaaaggaagagggaagaagatcgtaaaaaagggttatctgtaccagaagaatatgtttttcaagatgtgcgagaacagttaaaatacaatcgttatcttgcaaatatgccaaatggttattcagttgcaaatggaatgaaagaagcgatacattatttacaacatggtgaattacatatagatgaagtgagtggaatttttatttgttcagacgggttattccacccagattggtcattagaacaaactgttgcatatataagaaagaatagtataaacgaatatgtagcaatcattgaaaagctggaaggggaaaagagaataaaaccagatgataaaacgattattatgattgatttttaagaggaggcagttcaaatggaaattaaatatgtcaatctaacatttcaagatgaattagttcctttagaaaaagtaaatcaactgattatccaccatacagctgaagatggatgggacgtgtataaaacgcatgaatttcatcaaactgtaagagggtggagcgggattggttacaactattttatcgaaaaggacggaactgtagtggaagggcgaggtttacatattggagcgcacgcgaaagaccataaccgtcatacaattggaatatgtatgacgggaaatttcgataaatacgatccaactcctgcacaagtgaatgcattatattctttatgcaaaatgtttatgaagcaatttgctataaagaaagaaaatatactaggtcatagagagttagaaggagttacaaaaagctgtcctggtaatcgtttttctatggtagagttaaggaagatattatcttaaatatagaggagtaacaacgatgatgaatataaaaataccaaatgataaaaaagaagagcttgtagcgcaaattcagcaatttttcgttgaagaagatttagatgaaattggacgtttccaagcagagcgtttaatagaagaaatggttaaattagttggaccatttgcatacaatcaagcaattggagatgcaagaaagcttgtaagtgagaaattaacgaatatcgaagaagatttatacgtgttagagaagaatgaaggaaaataaaaaaagagcccatcggctctttttttatttgattgatagcaaaaaaacatagggaaaacacggaaaagacattgaaaatacaccttttatttttagaatattcttagttttaaaatacttcagaaaggaagattgtaatgagattaacgccaagagaaattgataaactgctagtagttgttgcggctgatttagcttatcgacgaaaggagagggggcttaagttaaactatccagaaagtatcgctattattacgtatgaaattttggaaggagcaagagatggtaaaaatgtagcggaattaatggaacttggaaaaaacattttaagtgctgaagatgttatggatggtattgcagacatgatatcagatattcaagttgaggcaacttttcctgatggaacaaaattagtaactattcatcagccaattcattaaaggaagtgaatgttatgattccagggcaatatatccttgcgaaagaagacatagtgtgtaatggaaataaaaaagcaatgaaagtcaaagtaataaatcagggagatagacccattcaaattggatctcattaccacttttatgaagtgaatgaggcattaaaattcaatcgcagtgtagcaattggacaacatttaaatattccagcaggtacagcggtaagatttgagcctggagatgaaaaaacgattgaactagttccatattcaggggaacaagaagtatatggatttaaaaataaagtggatggcgatattcaatcttacacaaaaagagggagatagcatgagttttaagatgtcacgtaaacaatatgctgatttatatggtccaactacaggagattctattcgtttagcggatacacaattattcgcacatgttgatcgaaatgccactgtatatggtgatgaagctgtctttggtggaggaaaatcaattagggatggtatgggacaaaattcacaacttacaagagaacagggggttgtggatgttgttattacgaatgcaattattattgattatacgggagtatataaagcggatattggtataaaagatgggaagatttcagcaattggtaagagtggtaatccttcagttatggataatattgatatcatcattggaacatcaacggaagtaatttctggtgagcggaaaatcgttacagctggaggtattgatacacatgtgcatttcatatccccacaacaaattgatacggcattggcttcaggtataacaactttaattggtgggggaacaggaccggcagaagggactaaggcaactacaataacacctggatcttggaatttaagaaaaatgctagaagcagcagaagcttttcctataaatcttggatttttagggaaaggaaatagttcaagtttacctgccctggaagaacaaatatttgcaggggctatcggattgaaaatccatgaagattggggagcaacttcgtcagcaattaatcactcgttacagattgctgataaatatgatattcaagtcgctattcatacggatacgttaaacgaatgtggttttgtggaagaaacgataaaagctattgataatcgtgttattcatacgtaccacactgaaggagctggaggtgggcatgcaccagatattataaagattgctgcgctgaataatattttaccatcatcaacgaacccgaccttgccatatacagtgaatacgctggatgaacatttagatatgctcatggtatgtcatcatttaaaagcgaatattccagaagatgtaatgtttgcagattcaaggattcgaaaagaaacaatcgcggcagaggatattttgcaagatttaggggttttcagcatgattagctctgactcacaggcgatgggaagggttggagaggttattattcgcaattggcaaaccgccgataaaatgaaaaagcagattggtagtttagagggagataaagaatataacgataataatagaattcaacgttatatagctaagtatacaattaatccagctattacacatgggatttcagaatacgtgggctctattgaaataggaaagtatgcagaccttgtaatatgggatccacaatttttcggtgttaagccagatatggttttgaaaagcggaatggtagtgatggcattaatgggagacgagaatgcttcaattcctaccccacaaccatattatgaaaaaaagatgtttggtgcatatggaaaagcagtacagtcaagttcgattacatttgtatcgaaagtagcttatgagaataatattaaagaaaaattgggtttaaataaagttgtattacctgttaaaaatacgagagagatttcgaagcaagatatgaagttaaataatgcaacaccagaaattgaagtagatccgcagacatatgaagttaaagttgatggacaagtaatcacgtgtgaagcagtagatgtactacctatggctcaaagatattttttattttgatataacgggggagataaaatgattattgaaaaaattaataacaacgtatgcaatatgaatgatttctcaaacacaaaaaagcatcttgataagatattaatttctagtgagcttttactgaagagagttcagaaattatattcagaatctggttttgaaattggggtgtctttagatagtggagaaacattaaagaacggtgatattttatatgaagatgaaaatcgaattgtgtatattgaagtattaccagaagaggtaattgtaattactccaaaatcaataaaagaaatggggattattgctcataacttagggaatagacatttaccagcacaattcgatgaagggtgcatgattttggcgaacgactacttagtagaagatttacttaaaaaggaaggtgttccttatcaaaaagaaaatagagtattaccaaaaccgttcaagcatgcttcgcacaaacatatttaacctacttaacctactccaaattagtgattcgaacttcccaacaggaagttttagtcactcttttggattagaaacatttattcaagagggacaagttacaaataaagacgggtttttcaaatgggttaatcgatatgtaaaagtccaattaacatacacggacggcttaatttgcaaatatacttacgaagccattaagaataatgagggagaacaaattacatttttagatgatttaataacagcacaaacattgccttttgaatgtagaaaagcaaatagaatgattagtaaaagtacttctaaattattgtgtgaattgttctcgtttgtaaatttaaatatatataaagaaaatattatgggtaataaattacaaggtcatccgagtattgtatacggaatattaggggcggaattgaaaatgacaatagaagaaacgctcttagttttcttatactcaagtgttggaagtataattcaaaacggtgtgagagccattcctcttggacaaacagatggtcaaaaactattacaagaatgccatgaattaatctgcgaatctattgatagaattcaaatactttcattagaagattttggattgaatgatcctgaattcgaaataaatcaaatgcaacatgaagatgtaaatgtaagggtcttcatgtcatagggaggaagaataaaatgataaagcctattaaaattggtatcggtggtccggtaggtgctgggaaaaccatgttagttgaaaagttaacaaaacatctaaatacagattatgaaattgcagcaattacaaacgatatttatacgaaagaagatgcaaagattttattgaaaacaggtgttttatcagaagatagaattattggtgtagagacaggggggtgcccgcatacagcaattcgagaggacgcttctatgaattttgaagcaattgaagaactcatgattagacataataatttagatattatttttattgaaagcgggggtgataatttagctgccacatttagtccggagctagtggatttttcaatttatattattgatgtggcacagggagaaaagattccgcgtaaaggtggacaaggaatgatcaaatctgatgtatttgtaattaataaaacggatttggcaccttatgtaggagctaatcttggagttatggagcaggatacgaaaaattaccgacataataaaccatacttttttacaaatttgaaggatgaggaaggtttacaagaattaataaattggatgagacagaacattatgttagaaggactgaaaaaatgaaatcccctacaggtgtcttaaacattgatatgatggaaaagagacataaaaccgtacctattaaggtttatcataaagatgccttaaaagtaacgcagccaatatatttggatgagtatggtagagcatattactatattatgaattctggtggaggctatttaaaaggagatttctattctataaatataaatgttggtaaagatgcgaaaacatatataacaagccaatcagcaacgaaagtttacaagactccaaatagttatgctttgcaagaattgaatttttatattggtgagaatgctgttatggagtatttaccagacccgttaattatgtacaaggatgcagcatataagcaaaaaacaaatatatatatgcaaaataattctacattgattttatgcgattcagttacgcctggttggtcgccaaatatggagaagttcacataccaatattttgattcgttaacaaaaatatatatggaaaataaacttgtagtatacgatcatttattgctaaaccctttcaaagagtcgttagatcaaatgggaatattaaatcaatattcccattatggtactttcatagttattaatgagaacattacaaatgatttaattgcaacattgaaaacatcactttctaacactaacaatatgaaaattggaatatcttctacaccatgtaaaggctttgtcattcgcatacttagtcataatactgaggatatggagtctatattttttcagtgtcatcgttttgttagagagaattgtctacatgaagaattaacatcctatcgaaaatattaagtaggagaaggggatactatgactaatgtgggattattgtttgtcggtgcagttctatttatgaattcactagcagcttttaaacttattgatagcaaaagtgtaggatactttaatttatttgtaggggcattacaaactttgacaccattatatttattatttacaggaagtcaatccgatgagtggactatcctatctaatggaactatttttttatttggttttacttatttatatgttggtcttacgaatatattaaaacttgattcttcaggtgtaggttactattctctttgggttgctatcattgcaacggttatgggaattgtgaatcaattacatgagagtggtagtttgcaaagtacaataatttggttcttttgggcattcctttggtttttatttttcctacaagatggattgaaaaagaagattcatatttatgtaggtattgtttgcttcattgaatcttggattactgcaacagtaccagctctgttaacacttacaaatcataccgacgtgttaaataattttgtaattattttagcgactattataacgattttagtttttattatggcacttttctttttcaagagtattcaatttaaagtagaaagggttagtaactatgtggaaaagtgaactgaaaaaggcaaccaacttttttgttattattatatttcttcatgtgcttggaattttattattattaccggcgctatataaaggtaatagcataatcggaatggctattattgcatattctttagggttgcgtcatgcgtttgatagtgatcatattgtcgcaattgataatactgttcggaaattaattgaaaaaggtaaaaactcacagggggtgggattttacttctcattaggacactctacggtagtatttgcgatgattgtattaattgctttaattggaaaaacggcaaaacatggaatggagagcttttcaactataggcggtattatcggtacaatcgtttctagtacattccttatcattattggtcttaccaatctgttgtaccttattaaagtgttgagaagccacgaggacaaacagccagaaaatttagggtttatatatcgtttcacacagcgcttatttacgtttattgatagtcagaagcaattgtatataatcggttttttatttggacttggttttgatacagcgagtgaaattggattaattgctctttctacagtaactgcaacaagtcaatctattccacttgtaagtatatttgctttccccgttttgtttgctgccggaatgtcattgatggatacattagatagtacattcatgaatacgaattataagtgggcaatggaaaatagtcgaataagaaattcatataatgtattaattacctcaatatctgttattacggcttttttaatagggggatatcaactattatctttgcttattgaaagctataatttacagggcccgttttggaatctcatacaagtagttaattttgattatctgggtatatgtcttgttgcattctttattatttctcttattgtttttgttgtatggaatagaaatgcctttaaagaaccgcttacaaagagcatagagaaataaaaatatatcatatgtcatttggttcattatgtatataaagtaaaataaaaaacacgttagatgaaaattcatccaacgtgttttttattatttatgttccttatattcatgtactttttctttcacattaccaactgtatctttagcagtgcctttcaccttatcccattttccttcagcttgtaatttcttattgtcagttactttcccaacagcttcttttacttcgccttttaccttatcaatggcaccttctactttttcttttaaaccgtgttcatgcttagtcatacatttctcctccttgtagtttgattagaattctcttttcatagtgcaagttgaatgatgtacctagtaatagcgtaacaaatctagttggaatattcaaatgattaataggatagaaaaggaattgtcataaaatgtttaaaaatgtaacggaaggagaaataaagtaaattataatatgtctcttgcggtccatattgattttgtataagcaattttcatgtgggcacgttccatgttattttgactgccgctaccgaaccttgcttgtccaactattaaagtacaattggattcaatagctgtcttaattcgtttttgaattaatgcagtatgacagcctttacgctgaaattctggcaaagtagcagaagcagctaatgatgcgacacccttatttatatacaggacaccaataccagcagggatattttgaacttcagctatgaaaaaatgccatcctggttcattgtaaagaatttcattattttggcgcacgctatcttttgtaaaggatggcatattaaatccacatacataaatgtctgcaaaaatatcaaactcattttcttttagttttcgtattgtaatattagaaggaagaagtgatgaaccctctctcggtatactatacaaagcggtatggaagctagattgataaaaccctttttgagataagtattgaaataattcagttgtaccttgtgctggggtaatttcaaaacgacaagggatttgtagtgattcataataagaaatgattgcatcaatcgcatctgcatttgtaataccttttaccgtattaaaagcaggaccagcaattatttttgatgaaaaggcagtggcgctaccgaatttttttatttgcacttgcatggggtttccgcttattgtttgtagtctctctaatctagaagagagcatatcaatttctgcattttcaatttctgttgctatatcgagtgtcataacagtagtcataaaattcctccgttaataaatatatttcatagtatatatacgatttttgttttgagattcctgttgtaatgtaggagaataagaagttttttggaagggaaatggaattgaactgtcgaagggagtagaaacagattaaaggtggtgctctcatgaaacagaaagacgtgcagacatgctctaattgtggttctcaaaatataggagaaggtgagtttgttggatatgcacaaatacggaaaaaggaaacgatgttcacatcttcaccggtggatgcttatatttgtacagattgtgggaatatccttttattaaaggtaaggaattatgaaaggtttaaacagaaacctttatgattattgagaagtggtcatatccaactttgtatacgaaacgacttatgttaaggaaaatgaatatgagtgatagtttacatatatatgagtatgctacagataaagagatgacaacttttactgtatgggatgctcattgatcgttatgtgacacatataactatatagaagaaattgtggggcaatataatggagggcaagtagcacctcttggaattgtattaaaagaggagaagaaacttataggcacgtgtggatttataaaatatgatttggtcacacatacagcagaaattgcatacgccttatctcgaaaatattggggaagaggattagctacggaggctgcattagcttttttctactatggttttcatgagttgcatcttaatagtattgaagcgggatgtgattcagaaaatgaagcatctgaaaaattaatgaaacgtttgaatatggagtacgagtgcacgattcaaaaggatatgttcattaaaggtaagtatcgtgacacgaaaagatattgtatatctcgagaaagatatatggataaatgaaatatttcatataaaaaactcctttaaatgaataaaggagtttttttatttttcataacaataattacctttaattgttataattggttgttaaggggtcttggtttattaacgccataatcatagaaggaaaatagctaaatcgtctataaaaccactaaataacacaatcgcaaccgtaagttgacaaagtgcaaccccgggaagatagagataagggcaatgtctacatacaatttaggtaagaaaacaaaggggggcacacatatgggatttggtgaaaagctttttaaattaagaaaggaaaagggcctttctcaagaagcattagctgaaaaattaaacacaacaaggcaagcggttagtaaatgggaaaacggtcaaggttttcctgaaactgaaaagttaataatgattggaaatgtttttgaagtatcactcgactatttattaaaagaaactgcagagcaaagtaatgaaaatgtggatggctattacgtaagtcaggaaatggcagaagggtatatagtgtacggacaaaagatttcaaaatatatagcgttaaggtttagtttgcttattttgtctacaataccgtatctattatttaaagaaaatgcaacaatgtcgacatttcttgtcattatcattgctgttcttggaattggagcaatgatggcacctgtaacgatagaagagagtcgatacaatgtattgaaaaaggaagaactactatttgatcaaaactttctaaaagaattgacaaaaagatatgtgattattaagaagaagtatgccgcggtaatgatcgttggattttgttttatagcagcaggcgcgatcccgtttttgtttgagaaaaagcatatcacttcaggggaattagttcagtattatccgtactgtgttgtacttattgctatcggagtttatctttttgttcgtgtgttaggagtatgggagatatatcgaattttagtagaaaataaggaatacagtaatcgttttatttttaaactgaaaaagaaagtaagaaaaaaggtagatagtttataaaagataaaaaacatgtttcgaatcaatgtattcaaaacatgttttttatcgttctgaattatttccaaagaaataattcagaaaaaacagaaaaatgtcgtaaccatttacggaagtctgttataataaacgaaaaatgaaaacgctttaaagggggatataaccaatatgatgatgaatgtaccgctaacaattagttctatgatggaaagagcagagaaactgttttcgaagaaagaaattgtttcacggacacatgatacagttacaacgttaacatataagcagttaggggaaaggacgagaagactttccagtgcgttgaaaaagcttggaattaaagaaggtgaacctgtaggaacattagcgtggaaccatcatcgacatgtagaagcgtattttgctattccaggtattgcttctgttttgcacacgattaatattcgtttatctcctcaacatatttcatacattattcagcacgcagaagaccgaattctacttatagatgaagatctcgtaccgctcgttgaaaatattcaatcacaattatcaactgtacaagcttacattattatgactgataaagatgaacttccaaatactatgctggagcctgtatatcattatgaaaagctattagaagaaggcgatcccaatttccaatttgtaaaagatattgatgaaaatacacctgctggtatgtgttatacgtcagcgactacaggaaacccaaaaggtgttgtatatacgcatcgtagtactgtattgcattgtatggcactcggtttagctgatacagctgctttatcggaaagtgacgcagcaatggcaatcgtcccgatgtttcatgtgaacgcttggggacttccttttgcggctacttggtttggatcaaaacaagttcttcctggaccgatgtttaccccgaaaattttattagagatgattcaatcagaaaaagtgacgttagctgcgggtgtgccgacaatttggctcggcgtattacaagagttagaaaataatagttacgatttatctagtatgacgagaatactatgcggaggtgcagctgcgccgaaaagcgttattaaagcatttgaacagaaacataatgttccattcatacatgcatatggtatgactgaaacgagcccactcgtaacacttgcacgtttaaaaagttatgaaacagaattatcgtatgaagagcaattagaaattagatcaaaacaagggtatcttgtccctggtgtagagatgaaagtagtcggtacaaatggtgaagtgaagtgggatggtacggagatgggagaactatgtttacgagcgccatggatcgctgaaagctattataacgataatcgtactgtcgaaggttttcgtgatggttggttatatacaggagatgtcgttacggttgatgaggaaggctgcgtgaaaattgttgaccgtacgaaggatgttattaaaagcgggggagaatggatttcttcggtcgatcttgaaaatgctttaatggcacatgatgctatatttgaagcggccgtcgttgcgattcctcaccctcagtggcaagagcgaccaattgcctgcgtcgttcaaaagaaaaatagtacggttacaaaagaagaaatatatgagtttttaaaaccacagtttgcgaagtggtggttaccagatgatattgtatttatggaagaaataccgaaaacatctgttgggaagtttttgaaacaggcgcttcggaaagaactggagcatttgcatagagagaaataagtgaattcttatttgtaaacttaaattaaataaaagttgacaaaagaagggtggaaagataatataattttcgtgatatgttacctaaaaacacttttaagtttacaaacaggagaagaaaatatgcatacaaaaaaattagttttcgtcgctttatttagttctattatgggagtgttagggttaatacctccgattgctctttctattacaccagttccgattacattgcaatcactcggtgttatgcttgcgggtggattgttagggtcacgccttggtgcattaagtcagcttattttcttacttattgtaggagttggagcaccattacttgctggtggacgcggtggccttggtgtatttgttgggccaagtgcaggatatttacttggttacatcattggagcgtttgttattggttatttaattgagcgtttacgtgaagtttctattataaaagtattatgtattaatataattggtggtattttcgtagtttatgtatttggtattactgtacaagcgtttttaatggatgtttctgtatgggagacaatgaaagtgagtgctgtgtttttaccaggggattgtataaaagcaattatcgcggcgattctcgtaacaaaattacatcgttcattgaaacatattattacgcccgctttaaagaatggaaaatatacaaatgcgggatgataaagggaagaaacacgttaattccgtgtttctttttattatttttgtaaagaaaggacgtctcatatgggtattacaaaagaatacaaaaagcatgcctctttacaaccaaataaaatagcgataaaggaaaatgatagagttttaacatataaagagtggttcgaatcagtttgtaaagtagcaaactggttgcacgcaacagaatcaaagaataaaacaatagcaatcctattagaaaatcgtatagagtttttacaactattcgctggtgccgctatggccgggtgggtttgtgttccgttagatataaagtggaaacaagatgagctcagagaaagaattgagatcagtaatctggatatgattgtgacagaacgatataaggtaaatgatctacctgatgaagaaggaagagtaattgaaattgatgagtggaaaagaatgatagagaaatatcttcctacacattccactgtagaaagtttacgaaatgctcccttttatatgggatttacatcaggatcaactggaaaagcaaaagcatttttacgtgcacagcaatcgtgggttcatagttttgattgtaatgtacatgactttcatatgaaaatggaggattcaattttaatagctgggacgctcgttcattctcttttcttatacggggcaataagtgcattatatgtaggacaaacggtgcacattatgagaaagttcattccgaatcaagtattagataagttagaaactgaaaatatatcggttatgtatacagttccgacaatgcttgaatctttatataaagaaaatagattaatagaaaataaaatgaaaattatttcatcaggagcgaaatgggaagctgaagcgaaagaaaaaataaagaatatatttccttatgcgaaaagatatgaattttatggtgcatcagagttaagttttgtaacagcactagtcgatgcagaaagcgaaagaaggccaaattcagtaggaaaaccttgtcacaatgtgcaagttcgaatatgtaatgaagcaggcgaagaagtacaaaaaggcgagataggaactgtttatgtgaaaagtgatcagttttttatgggatacataatagatgggggtttaacacgggagttgaatgcagatggctggatgacagtgcgagatgtaggctatgaagatgaagaaggctttatatatattgttggtagagagaagaatatgattttatttggaggaatcaatatttatccagaagaaatagaaagtgtattacatgaacacccagctgttgatgaaatagttgtaattggtgtgaaagatagttactggggtgaaaagcccgtcgcgatcgtaaaaggaagtgctacgaaacaacaattaaagagtttttgcttacaacgattatcctcgtttaaaataccgaaagaatggcattttgtagatggaataccttatacaaatagtgggaaaatcgctcgtatggaagcaaaaagtatgattgaaaaccgggagaaaacatatgaataaggcagttattgtagaggcgaaaagaacacctatcggtaagaaggatgggatattaaaagagtatgaagttcagcaattagcaacgccgcttcttacgtttttaagtaaaggaattaagagagagatagacgatgttatattaggaaatgttgttgggccaggagggaatgttgcaagattatctgctttagaggcaggacttggctatcatattcctggtgtaacgattgatcggcaatgtggtgctggtttagaagcaattcgaactgcgtgtcatctcattcaaggcggggcaggtaattgctatatcgccggaggagtagagagtacaagtacgtcaccttttcaaaaaagagcaagattttcacctgaaacaattggtgatcctgacatgggagtagcggctgaatatgttgcggagcgttataacataacgagagaaatgcaagacgagtacgcttgtcttagttataagcggacactgcaagcgttagaaaaaggatatatacatgatgaaatattttcttttaatggattattagatgaatctataaagccagaaatgaattatgaacgaatcattaaaagaacgaagcccgcatttttacaaaatggaacagtgacggcaggtaattcatgtggtgtaaatgatggggcatgtgctgttcttgtaatggaagagggacaagccctaaagttcggttataaacctgtccttcgtttcgttcgtagtactgtagtgggagtggatcccaatcttccagggactggtccgatatttgcggtgaacagattattaaacgaaatgaatgtaaaagtagaggacatcgattattttgaaataaatgaagcattcgcctcaaaagttgttgcttgcgcaaaagagttacaaattccgtatgaaaaattaaatgtaaatggtggggcaattgcgctcggtcatccgtacggtgcatctggggctatgcttgtaacacgtttgttttatcaggctcaaagagagtttatgaaatatggaattgctacattaggaattggaggcgggatagggattgcgctattatttgagaaagtagaagactagtgaggtaactagttttctactttttgaggaacataaacattgctgccaggcttcgctttcatttcgttccaagcagcaatcgcatcagcttttgcttttcctttattatttggatctttgaaaaagtcccgagtaaagcgattgtattcaaattgcgcgctgatcgttgttttataagtaggatctttttttcgttcgttttcttcataccaaaatgttatcgcgtcttcatatgtttttccaacattctctttaaaaaacttttgaagagctactgtaaagcggaagtttgtttcgattttttctttgaaaaaagcacgaacatcttcgctacagcggtgatttttagtaataatcgtttgaagagaaaggtctttataagagaggggagctttgctcacttttggcacagagctgttttttaagactttccccgtagttaaataatgtgagatacgctcggttatttcgatcttagagccactagctggcagaccatgctcgcgacaaaatgtttgcagttctgcttttaaccaataataattttggaaatctgtaagagatatagtttttgttaaagatggtcgcatgaatgtaacaactactttcttccataattttctttaattataaaacatacgttctttttatggaaggattaatgtgtaaatataatgggaagaggaggttatatatagaaaatataatgcaagttcgtgttacgggaattttaattgaagatgaaaaagtattgctagtaaagcaaaaagtggctaatcgcgattggtctttacctggaggaagggtagagaatggtgaaacgttagaagaagcgatgattcgagaaatgagagaagaaacaggattagaagttaaaattaagaagctactctatgtttgtgataaaccagatgctagtccatctttgttacatattacgtttctgcttgaaaggattgaaggtgaaattacactaccttctaacgagttcgatcataatccgattcatgatgtgcaaatggtaccgattaacgaattaagttattatggtttttcggaaacttttatcaatcttataagtggcggttttgcaaatgcaggaagttatcaagggttgaaacaacatataggcctgtaaatatagttgaaggatagccgttagctatccttcataaacatgttttacactgctgactgtaaagaagaaacaagctgatttaaaaactcgtccccgttcataaccgcttttccgccgccgcgtgcactctttttatttccgccaccttttccttcaattgtaggaagagcatcttttaaaagagcattcatatcgagcgttactgtttttccgcaagcgagaatacattgtagtttgtcatcattttcaataacgaaatacgtaattgcatgctcttgttgttctgtaatgatagctgatatttttgcaatttcttgcatagaacgatctgtaaatgctttagaaataagtaacccagcatgtatttcggtgggctgttgcagtaattcatttgcctctgcaaataataatttttcattcattgtttgtgttgttttttcgttttccttttgagaggtaagaagctgtgccacttttgctgggatatcagtttcgctactgtttaattgtttggaaacatctttcataatttgttgctgttgccccattaatttaagtgtacgccaaccagcgataaaggttaagcgtataccacctttattgcgctcccatcctagtacttgaataagaccaacttcaccagtgcgtttcggatgggttccaccacagccgttgtagtcgtaattttcgataataacaacgcgtatattttctgttatattcggttctttacgaagaggtaatgttttcgcttcttctaagttcatccactctatacggattggatggttttcaaaaacaattttgtttgcaatttgtactgctttttcaactgtttctgtatgcagattttctgtttctaaatcgattgttaccgtttctttaccaagatggaatccaatcgtaggtatgttaaaatggtcccaaaaagcagcagataaaatgtgctgagccgcatgttgctgcatatgatcaaaacggcgctcccaattaattttaccttctacgtcttctgtatgtaattgttctgcgatgtagtgacgaatttctccgtttatctcttctacattgattacattgatatcatttaatgtaccagtatcatatggttgtccgccacctgtcggataaaatgctgtttcattcaaaacaacgtataagttaccgtttttatcataatcttgctttataattttagtagtaaagtcttgcttataagcgtcagtgtaatataatttgtgctccaattttctttctcctctcgcattaactagtttcattgtaaagcaattgaaattagtttcctaatatttcagaagaaagaaactatttttagaattttcttgctataataagaagaaaatgcgggggtggaataaatatgttatatgaaaatggcgtagataaactgcttagtttaagcaaaaatatttctgaattgtatcgagaattaaatgaaatgacccggattttaacggagtgtaatcgagaaagtgtgaagtttgatcggttatatgtaaaagagttactttggaagaaagaagatgtaatagagaaatatgaccagctacttgtacaactttgtattaacgaatgctttgatctaaaaagtgtcattacaggcgaatataagtatacatatgaagaagtggagaacatcgttttacaatttaatgagaagtataatgttgcaatattaattaaagatgtttgtaaagaattacagtttacatatggcatagatatggatataacgagaacagcgcgggtatcaacagcgcaagtataaaaagggaaaagaaagcagatcctttgctttctttttttatgtaagaacagggagagtaggtttttaagatgaaggggaagttgcaaaatattcatccgttaggaatgacaattataatagggactttatttgcgaggtttgccacgtcaatgagtattccttttttagcaatttatttaacgactgtgaaaggtgtatcagctggaatgacaggtgctattatcggaacgagtgcacttgttggagtgtttgctagttttatcggagggaatttatcagatcgattcggtcgaaatatgattataatatggtccatgatcgtttgggtctttgtattcattggtttttcacttgcagatcatgttttaagtttctttttattaaatgctttgaatggattatgtaggtcattttttgagccaacatcaagagcgttattatcagatttaacgaaacctgagtatcgtttactcgtatataatttgcgttacggtgcaatcaatgttggagtagcgattggcccacttgtcgggttacagattggaagcgcaaaatcaacaattccgtttttagtagcagctggagtatacattttatatacagctatattagcgttccaatttaagaagtatccgattgaaaaaaagaaagtaaatacagaaaagcctgtcacaatgttaaaggcaattcgtattttgcgaaaggatgtcgtatttttagttgcactagttggtattattttgagtaattgtggtttttcacatttaacgacaacagtatctcaatattttgcaaatgcacatatatttcaggatggagtgaaattattttcatatatgctagctttaaatgcgattgttgtagtcgtaattcaataccctgttattcaaatttgtaaaaagtatacaccgttaacatcaattatggtgggggctttatttgtgagtgggggattatttggctttggaatagtagaatccatgctaggtgctgccgtttgtacaattatttttacaattggagaagtcttaatgttttcgatgacggatgtatttattgatgatattgctgttgcgcatctaaaaggaacatacttcggtgcgatgggcttttcgggaattggagcagtaataggtccgtggtttggaggagtacttctcgattactacgggtaccaaaatgggtttgcagtattttcagcattagctacattctcaactgtggcatttcctgtgcttttagttacaaaaggtttattgaaaaaaaggtatgatagaaattctaatatagaaatgcatgcgaaataacataagccccagtaccaactggggcttatgtttgtattatattaactcttaatttgaaaaaagaactttcttttcatgtttatcagcaacttcatttttggaaatatgaatggccaaaaaaccattctctaagcaggctagcatcttcttataaataacattagcgggtaaagggatagttcgctgcaaagaaatgtttttatgaagtatgcaaatggttaggcctgtctccatctttttaatgactacattttgttcattggcatttggtacatctgtttccaaaatgtattcttgttcagtttcgcaaaggtcaatatgaatttgatttgggaaactaaagttactacaagagtcagaacaaaactgatccatccattcttcgaaaccatcaacatgaaaaagacaatccttctttttcttgcccatgtaagacaccctccgtaaaatctcaattcatactatgttatgcatgaatgaattaggggtgaagaataaatggaaaaatataaacattgtatgtggaaaagatagctagtgtgcactttttgttttacatatcatgatgcgcatgatgtttttggcgtgaatggttacggttttttactttatgagatccgcttaatggttcaggttgtccttttttttctttcgcttcacgattgttttttcccattgtatgtgacacctcctcttcctttttagaatgagagaagtttgcaaatttatacgagaatgtttttagaaaaaaaggtaaagataattgggactaactattacagaaaggggattatataatgccatatcataaagataaacaacaagcgtttcaagcagcgcagcaaggcgttacacaagcagaaaatgcatttaacaacattgtgaaaaatgatccaaactacggtcatgatttaaaagaattacgccaagaggttcaggaagcatatgaacaaattcaaaatgcactagaggtagcttcagaaacacaacgtccacaacttgagcaatatgaaaataatctccaaaatataatgcgaaatgtagatcaattagaaaagtaaattaggttgttgtgtatttgacaacctaatttactttaatgaacattatgcgaaaacagaaaatttttctattcgttttttctttattatgcgcagtacatatatttcaagttgaaaaagtggaagcgaaaatgttgctcagaaaagagctagaaccaactggctatgtaacgtgggaagtacctaataatgaaaaaattattgccattacatttgatgatggaccagatccaacatatacaccacaagttttacatttattacgtcaatataaggctgaagcgacattttttatgattggatttcgagttcagcgcaatccatatttagtgaaacaagtgttaaaagagggacatgagattggaaatcatacgatgaatcatttatatgcaaatagttcatcagatgaaaaattaaaaaaagatattttggatggaaagaaatttttcgaaaaatgggtgaaagaaccgttgctattccgtcctcctggtggatatattaacgatgctgtatttaaaacagcaaaagaagcaggttatcaaaccgttctatggtcgtggcatcaagacccacgtgattgggcaaatccaggggtggaatctatcgtaaatcatgtagtgaaaaatgctaaaagtggcgatattgtattgttacatgatggaggaaatgatcgtagtcaaacggtagcagcactagccaaaattttacctgagctaaaaaaacaaggctatcgatttgtaacggtttcagaattgttacgttataaacattagaaaaaatcccaaaaggtgaatgttccttttgggatttttcgttactggttctttttgcgtttcttattattttgtctttctgcaggagttaagttttcatttgcaaactcttcgttataaccagtaccttgtccttgtgcggatgctgcattcattcctgaaatagtatgatttgcttttcttttacccattttatttcacctctataacatttttttgtatgttgaatgatgagcagttcatagtgtgtatgaactataagtaaagcgctaatagagcactttactttatggtaatagtattcataaggagcatgaacactattcaaatttagaaacataaagaaaacttatgataatctataagtttcttattatttacttatttagaaagttgtaataagatattatcgtaaggtattgaaaagtttgtctacattttatattcagacaacttagtcacgtttaacaggggggaaacataatggtcaaacataatccatttcaatcacgtgcaacttttgaagtagatggaaaaacgtatcattattatgatttgaaagcgcttgaaaatgcaggggttggcaacgtatctcaattaccatattccgtgaaagttttacttgaatcagtacttcgtcaagtagacggacgtgtaattacagaagagcatgttacaaatttagcgaaatggggaacgaaagatgtgcaagatatcgatgttccatttaaaccatctcgtgtaattttacaagatttcactggtgtaccagctgttgttgatttggcttcgcttcgtaaagcaatggcagacatgggtggagatcctgataaaatcaatccagaaattactgtagaccttgtaattgatcactctgtacaggttgatagagcgggtacggcagacgcgcttgcattcaacatggacttagagtttaaacgtaatgaagaacgttataaatttttaagctgggcacaaaaatcatttgataactatcgtgcagttccaccagctacaggtattgtacaccaagtaaaccttgaatatttagcaccagttgttcatgctgtgaaaaatgctgaaggtgacttagttgcatacccagattcattagttggaacagactcacatacaacaatgattaatggtatcggcgttcttggatggggtgttggtggtattgaagcagaagcaggaatgcttggacagccttcatacttcccagtacctgaagtaatcggtgtgaaattaacgggtacacttccaagtggtacaacagcaactgacgttgccttaaaagtaacgcaagtattacgtcaaaaaggtgtagttggtaaattcgttgagttcttcggtaatggactaaagagcatgcctttagctgaccgtgcaacaatttcaaatatggcaccagaatacggcgcaacttgtggattcttcccaatcgatgatatttcattagaatacttacgtttaacaggtagagatgaagaacaaattcgcgttgttgaagaatactgtaaagcgaacggtttattctatacagcagacagtaaagatccaatctacactgatcttgtagaaattgatttaaatacaatcgaatctaacctttctggaccgaaacgcccacaagatttaattccactttcagatatgaaagatgcgttccacaaagctgttttagcaccagttggaacacaaggacttggatttaatgagcaagagttcgataaagaagtgaaggttacattagaagataaagaagtaacgatgaaaacaggtgcaattgcaatcgctgcaattacaagctgtacaaatacatcaaacccatacgtattaattggagcaggtctagttgcgaagaaagcaattgaaaaaggacttgtagtacctgagtatgtaaaaacatcattagcaccaggatctaaagttgttactgagtacttagataagtctggtttaacaacatatttagatcaattaggtttccaaacagttggttacggttgtacgacttgtatcggtaactctggtccattagcgccagaattagaagaagcaatcgcagcaaacgacttattagtaacatctgttttatctggtaaccgtaactttgaagggcgtatccacccacttgtaaaagcaaactacttagcatcaccaccactagttgtggcatatgcacttgcaggtactgttgatattgacctgaaaaatgatgaaatcggtaaagatgcaaatggcaatgctgtttacttcaacgatatttggccatcagctaaagaaattgaagatgtagttcaaagtgttgttacatctgaactgttcaagaaagaatatgcacaagtatttaacagcaatgagcgttggaatgaaatccaaacttcaaacgaagctttatatacttgggataatgattcaacatacattcaaaacccaccattctttgaaggtttatctaaagagccaggtgaagttgaaacattatcaggcctacgcgtagttggtaaatttggtgactctgtaacgacagaccacatttcaccagcaggttcaatcggtaagcatacaccagctggacgctacttattagaaaacggcgtacaaccagttgactttaactcttacggttctcgtcgtggtaaccatgaagttatgatgcgtggtacattcgcgaacatccgtattaaaaaccaaatcgcaccaggaacagaaggcggatatacaacatattggccaactggtgaagtaacatctatctatgatgctgctatgaaatataaagaagatggcacaggtcttctagttgttgctggtaaagattacggtatgggaagttctcgtgactgggctgcgaaaggaacaaacttactaggtattaaagcagtaattgcagaaagctttgagcgtattcaccgcagtaacttagtgttaatgggtgtactaccacttcaatttaaagatggcgaaagtgctgaaacgttaggtcttgttggtaacgagtcatttgaaattcaaatcgacaaaacagttagaccacgcgatcttgtgaaagtagttgcaactgatgcagatggcaatgaaaaacaatttgaagtagtagctcgtttcgatagtgaagtagaaattgactactaccgtcacggtggtattctgcaaatggttcttcgtgagaaaattgaagagtctaaagtgtcgaactaaataattgaaatgaataataaggaagctaacaatagttagcttccttattttatggaaagggatgaaaccatatggtttcatccctttcttttttactacgaaaaatggaggaaacgtcatgaaagaatataaaagaattttgttaccgttacagaaagaaaaaatattagtaatagcagctgtatgtagtgggataattgctgccattttaaatttatcccgcccaattttcatgggattaattgtagacaatcttattcaaagggagctaaaaggtgcgtatgtatatatagctttgtttgcgggtagtcactttttaatgtgggcgaacaatcttttatttgattatataagttcaaaagcgagtcaacgtatattacaaacgaaacgtatagaattattgcgtcactatttctcattaccgtttgaagagagtgagaagattaagcaaggagagttagaaactttggtcgtgtctgatattccgaactgggtcagattatatggctctatattaatagaatatatacacgctattgcccaatttattggagctttcatagcactacaacatatagatatacagtttatattgtgggtaactccgtttttatttttaagtacaattgttccaatactgatgggagaaaaggtaagagatattgcaagcgtttctcaaaaaaatcactcaagtgttgtagagatggtgtcacagtttgtaaaggggatacaagatttgcggagtttacaaaaagaaaaatgggcaattcgcttatttaaagaagtaacggcacaatcgtataaatcagaagtaaagaagacgatgatgcaacattgcattggagtagttggaacggtgattgaaacaggagcatatattgttgttctcattataggtgcacaaaaaataatgaggggagaaatagaagttggttcactcattgcagtgttagcgacaattgagatgctctttttccctgtccgttatgtgggcgatttattaataatgacacaagttgcagtcgcttcggcaaatagagctttttgctttttaaataaacgagcagcagatagcaatgtagaaagagcgatggggatcaggataacaaatgtttcatttcaggagaatgacgaagagaaatgcagaattcataatattgatttgcaaattcgtcctggtgaactcgttatgattgtgggagaaagcggtgcaggaaaaacaacgcttttaaagttaataacgggcttgtataaaccatctaacggtagcattgcttattatggtaatgaagctcgtatgactacagtgtggcaagaaccacgttttttccgaacgacggtaacagagaatatgtatttcggggaagagggtttagaaaatcagttagaaaaaaatagtgaacttataaatgcaacgccgattattagagggttacctgaagggagtcaaactgtgctacataaaagcggtgaagagttttcgggaggcgaaagaaaacgtcttgcattattgcgcgcgattgtatcaaatccaactcttattattttagatgaaccgacggctgggttagatccgggcaatcaagaactggtttggaatatgattgaagggataggaagagatgtaacgagaattgtggcaacacatgatgtagagagagcgatgatagcagattgtgttgttgtcataaagaatgggactattgtggaatgtgggaatcctagagaattattaaattgcaactcattgtacaaagagttgcaaacaaaaagataagagatatgtaatgctcttatctttattccgctatttgccgggcagcccgattggtgagggctgattaaagtttcactttattcggtctcattaagttgataagtataagaattcgaatcactagaattaacttctttgacgagagtaagttgatttgtatctggattatatttgaaaatcttaattgtatgttcgctacttagtaatggattatattcttgaatagcgaatgtattttccgcgatttgtgtcatattactggtgggaacattttctatggaatcatgatttgtagaaatttcaacgactttttcactgttgaaaaataaaagaacgattactaaaataactaagcatattcgtatatagcgtagctctttggtgatagggtgttctcccaaaacaatcatcctttctatagctattctatagtagtaatggtagtcatcgtgaaaaaagtaataatgccgaggcctgccaaaaggataaatgagattaatgcgatatagagacaaatatgtccaactgttttttttcaggatctttactaaatagtgagataatccatgtgataattccgattggggaaaatataaaactaagaatatatagaagtatttttttaaataaattcatgagagctcctttcattgtaaaatgttctatgtatttctaattatatgattaaaaggtaaatatttcatcttagttataaaaattctgattatttagaatgtgaatatttccaagcttgtccgtataagctaaaataaggtatatagtattttgatgaatgtgttaaaagaagataatacgttagggtgatataaaatgtggcggaagcttacgattattgtagtgttactttgtttagcgggatatgcagcttatgaacagtttggttataaagagcaggcggtaaaagtgaagcaagaaaaaagtgaagctgcgatgaaagagattatcgcaaggaatggtattgagatagggaagagtgcaccggactttacattaacgaagttagatgggacaaatgtaaagttatcggatttaaaaggaaagaaagtaattttaaacttttgggctacgtggtgtggaccatgtcagcaagaaatgcctgatatggaggctttctataaagaacataaagagaacgtagaaattttagcggtcaattatacgccttcagaaaaaggtgggggggaagagaaggtaagcaattttgctaaagaaaaaggaattacttttcctattttattggacaagaacattgatgtgacaacagcttataaagtaattacgattccaacttcgtattttatagatacaaaaggtgtcattcaagataagtttattgggccgatgacacaaaaagagatggagaaaagagttgctaaattaaaataatggtgaaaaggtagagatggagagttcccatttctgccttttctttttcaagtagtaatcacttcatgatatgatgtaagaaatataaccgtttagagataaaggagtgtatggagtggggaatgtatccttaccgttagattatgttgtaattgattttgaaacaacaggatttaacccttataatgataaaattattcaagttgcagcagtgaaatatcgtaatcatgaattagtagatcaatttgtttcatacgtgaatccagagcggccaattccggaccgaataacgagtttaacaggtattactaattatcgcgtttcagatgcaccgacgattgaagaagtgttacctttatttttagcatttttacatacaaatgttattgtggcccataatgcttcttttgatatgcgctttttgaaaagtaatgtaaatatgcttgggttgcctgaacctaaaaataaagtaattgatactgtatttttagcaaagaaatacatgaagcatgcgcctaatcataaacttgaaacgttaaaacgaatgcttggaattcgtttaagctctcataatgcatttgacgattgcattacgtgtgctgctgtttatcaaaagtgtgcagctattgaagaagaagggaaacgaaaagtaaataaggctatgcttgatgaaactgcggtatatgaagcggtgaaagaaatacttgcatgtaataaacgtaatgtagaatggctacgttgtatgaacgtaggaagttatttagatataaaagctttttatccagttatgagattaaaggtaaaagggcgaaagaaatatgtattaacagagatattagaagaagatgtgaaagaaatatgtacaagtttaaaatgtgaaccggcgttaaaaagtgaagctggtaatacgagaattatgcttaatagcttagaggatgttatgaaattagaaagttatattttagagcagtatgattttgtattacaggcgcttcatgattataaagaaaatgaaatgaatgcagatgaaaagttgaaagagtatttaaatattatggtataaaaaactccgtgtgcaatatattgtacacggagtttttttaggagtactaaaacataaaattttcttgcaaatctgattaaagagttttttgtttgctcatactatgtaataagaaagcgaaggagagagggtgaacaacatgagaagaagtcgccgtaaatcgtttgaagaacttgtaaatgaaaataaacaacaattattaagcgatcgtgaggcaattgatcgcattgaagagcgcattgaaaaacgttatgaaatgaaactttttaagcaagctgaataattcttaacactagtacgatactagtattaaggaggcgatagtaatgggtaatccgaaaaaaaattcaaaagattttgcaccgaatcatattggaacacaatcaaaaaaagctggtggaaataaaggaaagcaaatgcaagatcaaacaggtaaacaaccgattgttgataatggttaaagaaaaggagaatattacattctccttttttatgtataaatttgaggaaagataggtaatttaagatggtgtgtatatacaatattaggagggaagtacatgccaaatccagataatcgaagtgacaacgctgaaaagttacaagaaatggtgcaaaatacagttgataactttaatgaagcaaaagaaacagcggaactttctaatgaaaaagatcgtgctgctattgaagcaaaaaatcaaagacgtttagaaagtattgactcattaaaaagtgaaatcaaagatgaatcttaacaaaatgtacaaaaagggctgacttttgtcagccctttttcgtaatcgtaaagttttcaacaagtaaacgccaattttgtggaaatggcaagccaatcttccaataactaataccgccaatgccctgctctttcattaaattgaatttactttgaatagacctcgcatcttcaaaccaaacttcatgttgtacgccattttcgtcaaagtaattaaaatgtggagcttgagctgtgaaatcatagcggataggaacattatatttacgagcaagtgcaacagctgcgacagagctaactgcttttgctggtggattcccttgtttgaacggaagtttccaatcgaatccgtataagttttgccccatcataattttttggggaggcatttgagattttgcgtattgaagtacttcttttacaggaccgataggagagattgccattggtggcccgccctgccaaccccagtcatatgtcataatgacgacgaaatcaacaatttgcccttgcgctttataatcatgggcttcgaaaaattttcccttttgatttgaacttgttttcggtacgagagttgtgcttaatgtgtacccgctaggtaagcgtgtttttacatttcgtaaaaagcgattatacgcctcgcggtcttcgggtgctacactctcgaaatcgaaatgaatgtctcgcatgccatatttttcagctgtttgcaaaatgttagtaataaatttgttttgaatcgttgcgtcgcgtaaaataaccgatgttagatcggcactgaaattaccattttcaatatttgtaataacgagcatagggattgtttgcccttgcgttgcaatattagcaattttagctgtttcagtaggttcttttaatgtgccatctctttttgcctcaaaactaaaataagctaaatatgttaaaaatggattgatggcacgtgtagcattaactaaactctctttaatcggtatagtggaaggttgtaaataagcgatggattctacagctcgttttgtgccttttggtacatataattgttgtccgacatggagaatagattttaaagataaattattaactttagctaaactagcgagggggacattatatgtttgagaaatccgatagaggctgtcaccaggctgtacataataattatttcctttcgtattaacgataagtgcctgaccaacaacgagcgtttcagcgggatttagtccattgtcttttactatttcgtcaggtgttgatccatattttgatgccaagctatatacgctatcaccgctacgaaccgttacaatttgaatcatatgcttgctcctttcgggaaaagattcactatttttattttatttttgatgtcactgtattatgattaaatgtatgcaaggtagcagaagtgaaagaagggaagaaacagttagtgtatatctacaaaaatatataattagtgataaaatatttgtagatgaaaaattgtcgccggagtaaagtagtttcatgggatgaaaaatatgaaagtatattcaattggtgattttgcaaaaaaaggcaggtaggatagaacaaactagttgccatcttcaagggaaaataagctaagaagatggttaaggggttgctggaaaatgatgcttgcgaagaaagtgagaatcaagccgaataaagaacaagaattgcaactttggaaatctgttggtacggcaagatgggcttataattggacactggcgaagcaagaagagaattacaagaatggcggaaagttcatatcagacgtttttttacggaaagaattaactgtattaaagcagtctgaagaatatgcttggttgtacgatgtttcaaataatatagccaaacaagcgattaaagatgcttgtgaagcatataagcgatttttcaagggactggctgataaaccacgattcaaaagcagaaggaaagcaaaactctctttttacaatgataatgtcaagttaaaagtaaaagaaaaacaagttttgattgagaaagttggttgggtaaaaacatccgaaaagttacctgtaggggttaagtactctaatccacgcgttagctttgacggtaagtattggtatttgtctgtcggtattgaacaggagtttacaaaagagaaattaacggctgtttcgttaggaatagatattggaatcaaagaattagcatattgttctgatgggcagaggaagaacaatatcaacaaaacaaaaatggtaagacaggtagagaaacgccttcgtaggttgcaacgtcaagtttctcgtaaatatgaaatgaataaggagggaaaccgttttgtcaaaacaagcaatattataaaaatcgagaaagagatacgacaactacatagaaggttatcaaatatcagaaagaatcatcttcatcaatccacgagcgaaattgtgaaaaccaagccatttcgcattgtgatggagacgttgcatatgaaaggtctgctgaagaatagatacctagctaaagcgattgcgaagcagtgtttatatgagttcaaaagacaaattcaatacaagtgtgaaaaatatggtattgaatttgtagaagctgatacatggtatccttcttcaaaaatgtgttccagttgtggaagcattaacaaagaactaaaactttctgaccgtgtatacaaatgcacttgtggtcacgaaatggatagggatttaaatgcggctatcaatttgtcacggtatgaattagccagttaacatctaaaaaagttacggctaatatgtaggattcgttgtatccgaatttacgccctcggagtgttacatcaaacgaaagtagcttctgtgaaatcggacacgtagaacagggaaataaacaaaaattatagatttttataagtttatggcaacggcgaatatacatatgtttgtagcagaacatgaagttgaaatccgttatgcggaaacagatcaaatgggtgttgtttaccattcaaactacttagtgtggcttgagttaggtcgcacgaaacttatacaagatttaggtttttcatatgttgaaatggagaaagaaggaattatttctcctgtgttagatttacaaatttcataccgtaaagcgatgcgttacggagaaaaagcaatcgtaaaaacatgggtagatactgtgagcccacttcgcgttgtatatggatatgaaatatataatggtgatggtgaactttgtattactgcaagtacgacgaatatttgtgcgaaaaaagaagggttccgccctgtatcatttaaaaagttatatcctgagtggtatgcgaaatatgaggaaattaagaaaaaataaaaaagcgtggcagaagccacgtttttttatttttcataattaaattgtgggaagtcgtcaccttcgttaagtgtaacagataaattatgtccatcgaagaaccattcatcatcgccttcaataaagaagttaataccttcttcttgaacttgaacagcaggatgtgcaggatcatctttacgaatccctaaagaaagtcctttttgcacagtactgcaaccaccgtattgtacgaaaaagcgtagtgtttcatttgattgtaagtttaattcatttttataccattgtgctgcttcttttgttacggaaagattcatgtatagttcctccaaattatgttgctttttctttagtataaaaaataacgcaaaaagacgctattaatatgcttcacgttttctttttgcgttatgtgggttacgatcttatttttgcttttttgaaaagtttgcttttggttcagttttatttataattcgtccgatatttgcacggtgtttataaataaccatacctgctaataaacacatcgcaataatgaagattttatccccgctaacaatggatgcaataacagcaacaactgctgttaccatagaagaaagtgatacgtatcttgttgtaaataaaagggtgaaaaatacaacagccaatattgcaaaaacaactggtgaatagcataatagcaccccagcagaagttgcaactgctttaccaccgcggaatttcgcgaagattggatagacatgtccaagaacagccgctaacccgaaccatagtggatgaatatctaatccgaaaatcattggtagacttgttgctaatgtcccttttaaaatgtcagcaattgtaacggtaaaacctgcttttttccctaatgtgcggaatgtgtttgttccgcctagattaccgctcccgtgctcacgaatatcgattccgtagccgatttttccaacaactagtgcaaatggaatcgagccaagtaagtaggcaacgataaataaaagatatgtagtaaccataagttcagtctcctttattcaaatgtgttgataaagggtaaaaagagtttttcccgtatattgtaccatacatttgtaaagagcacatttcttttttgtaaatgaaaaattcattatttcgtgaaaaaaatttcacagtaatgttacatttctcacagaaacagtaagactatatgtagtaacattttaatcaaaagataacaacatattggtggagggttataaatgttacaaaataatacacgtggagaagaagaattaatgaaagtgttcgagacaatagtccacggcaatgaacaagatttaatgcaagaaaatgcaaatgtagacggccgctctccaatgggcgtaatgggaacgttcgcatctgagagtgcaaaatattatgctgttgagaatttattgtcagatcaagtgaaaaaagcgataaatgaaaatatattatatccacatgatttagatttttatgcgacaggaacgacgacttgttcacaaattccgttagcgcaaatgcttgctaacggttttcatactggacatggacatatgagacaaccgcaagacattaaaagtgcattggctctttcgtctattatttttcaagcgaatcaaaatatgcagcatggtggtcaatcgtttgcactctttgatattgatttagcaccttatgtacgaaaaacaattgagagacataaaaaacgattacaatcatatccgcttacgaaagaacaaatagaggaatttgcatggaaagaaacggaaaatgatacgtatcaagcgtgtgaggctttcgttcataattcgaatagtatgcatagtaggggcggaggacaagtaccatttatttctattaattatggaacagatacatcaaaagaaggaagaatgttaattaaacaacttttaaaagcgacacaagctggacttggtaaaggagagacaccgatttttccgattcaaattttcaagatgaaaaaaggtgtaaattttgaagaaagtgatccgaactacgatttatttgaattagcattagagacaacggctgaacgattgttccctaacttttcatttttagatgctccgtttaatgcagtacattatgatggaagaccggaaagtgaagtatgttacatgggatgtcgtacccgtgttatgtctaatatacatggagaagaaacagcgattggtagagggaatttatcatttacgtctattaatttagtgaaattagcgttaattagtggttcaaaagaagcgttttttgaagcgctaaactattatttagatttaggaattaagcagctattagaaagatatgcgtatcaatgtacgaaacgagcaagagattttcagtttttatattcacaaggtgtatggcgtggtggagaaacgttgcagcctgaagactccgtagcctcgattttaaaacaagggacgttaagtattggttttatcggtcttgcggaatgtttagtagctttaacaggaaagcatcatggggaagatggagaatcatggaaacttgggtatgaaattatttcctttatgagagatagaatggataaagcgacagaagaacatcaactgaatttctcagtaattgcaactccagcagaaggattatcagggaagtttgtgaaaaaagatagagaagaatttggtgaaattaatggtataacgaaccataattactatacgaattcattccatattccagtttattataacattcaagctataaataaaatccgtttagaaggcccgttccacgctctctgtaatggaggacacattacttatattgaactagatggagcagcaatgcataacaaaaaggcattaaaacaaattgtacaagccatggcagaacatggcgttggatacggttcaattaatcatcctgttgaccgttgtaagtgctgtagttatcacggggttattgggaatgaatgtccaagttgcgggaataaagatgaggctaatatagaaagaattcgccgtataacaggctatcttgtaggagatatgtcgaagtggaatagtgcgaaacgtagtgaagagatagatcgggtgaaacataaatgaaagtgatgaatattattcatgatagtgtagtagatggagaaggattgcggacagtcgtgttttttgcgggctgtccgcatcgttgcgttggttgccataatccgaaatcgtggaatatttgcaatggaacggaaatgacagtagaagaaattgtgaaagagattgcaagtaatccattaactgatgtaacattttcaggtggagatccattttttcaagctgctgaagtgaaaaaggtagcaaaaatcgtgaaagatttgaaaaaaaacctatggatgtatacaggttatacgttagaagagatacagagttctcaaaataatgatatgatagagttgttacattatggggatgttttagtcgatggaaggtttgaaattgagaaaaaagatttaacacttccatttcgcggaagctccaatcaacgtattattcgattgaaagagtaaaaaggcgggatagattatatgaataaaacagtattgcttgttgaagatgaaagaagattacgtgaaattgttagtgattattttcgtaatgaaggttttgaagtaatcgaagcagaagatggaaaaaaagcgttagagttatttgcagagcatgaaattgatttaattatgttagatattatgttaccggaaatagatggatggtctgtttgtagaagaattagaaaagaatcagcagtaccaattattatgttgacagcacgttcggatgaggatgatacattgctaggttttgaattaggtgcagatgagtatgtaacgaaaccatttagcccgaaagtattagtagctcgtgcaaagacgttattgaaacgtgcggatggtgcggtaggagtagcggaagaaaatgctatgtctttagctggaatagaagtgaatcgtctatctagaactgttttagtagatggagaagaaattatattgacacataaagaatttgaacttctcgtttatttaatggagaacaaaggaattgtgttatcacgtcaacatttattagaccagttatggggatatgactattacggtgatgacagaacggttgatacccatattaaaaaacttcgaaataagctaggagataaagcgaagcatatcggtactgttattcgagttggttataaatttgaagaataatctagaacgatttgtgtaatttagcctagggaaatggcgattttatactctcttttgaaggtagaatgtacaaaaaatactttttttgtctacaatgttagataggagtatttttttaattagatttcacgatgagttcacaagaaggacacaaaacgtgactatactgaaaatacgaattcaccagagaggggaaataaaacatgggatattacgacggaccaaatttaaatgaagagcatagtgagacgagagaagtgagaaaatcaggtagtaaaaaaggctatttcttcacaggtttagtgggggctgtagtcggagcggtttcgattagttttgcagcaccatatatgccatgggctcaaaataatggagcgccagtatcatcatttagttcggattcaaaagtagaaggtactgtagttccagttgtaaataaagcgaaaaatgaaactgatttacctggtatgattgaaggggcgaaagatgttgttgtaggtgttattaatatgcaacaaagtgtagatccatttgcaatgcaaccgacaggtcaagagcaaacagctggtacaggatcaggtgttatttataaaaaagcaggaaataaagcatatattgtaacaaacaaccatgtagtagatggtgcgaataaacttgctgttaaactaagcaatgaaaagcaagttgatgcgaaattagtggggaaggacccttggttagacttagctgttgtagaaattgatggggctaatgtgaataaagttgcaagtttaggcgactcaagtaaaatccgtgctggtgagaaagcaattgccatcggtaacccgttaggatttgatggaagtgtaacggaaggtattattagtagtaaagaacgtgaaattccagttgatattgatggggataaacgaccagattggcaagcacaagttattcaaacagatgcagcgattaacccaggtaacagtggtggtgcattatttaaccaaaacggtgaggtaattggtatcaattcaagtaaaatagctcagcaatcagtagagggaattggttttgcaatcccaattaatattgcgaaaccagtcattgaatcacttgaaaaagatggtgtagtgaaacgtccagcacttggcgtaggtgttgtttcattagaagatgtgcaagcttatgcagtaaatcaattgaaagtaccgaaagaggtaacaaatggcgttgtattaggtaaaatttacccaatatcaccggctgaaaaagctggtttagagcaatatgatattgtagtagcattagatggccaaaaagtagaaaattcacttcaattccgcaaatatttatatgaaaagaaaaaagtaggcgagaaagtagaagttacattctatcgcaacggccaaaaaatgacgaaaacagctacattagcagataattcaactactaagaatcaataagtttaaaccttaattagtaaggttatccgcaaatagtggataaaagaaagtctctttcatattgaaagagactttctttatcggctatactaaaggaataggagggattaattatgacaattgaaaacccaactcgtacggaaattggtgaagtgttaaagaaaagcaaaacaattgcggttgttggattatcagataagccagaacgtacatcgtatatggtttcaaaagcaatgcaagatgctggataccgcattattccagttaatccaacagtagatgaggtgcttggagaaaaggcagtttcttcactaaaggatattaaggaacacgttgacattgtaaatgtatttcgtcgctcagagtttttaatggatgttgcaaaagaatttgtagagattgatgcagatgttttttgggcacaattaggagtacaagatgaggatacatacaaatttttaaaagaaaaagactatactgtaataatggatcgttgtattaaagtagaacatgcgatgacaaaatagtatagatttaaaggtagaaagattgattcagccctcattatagataagtagggccgatgaacgaggtgttcatcatgagattttttaaaggctgtttttgggggttgttatttgtaatcccattttggatcttgatcatttggatcataataaaggtttggaatgtgtaatcttggaatacatatccatttctcgttgacaaacgattatttttctgaaatagtagcctagaggaatccttgtgagaaaacaaggatttttctattgaaaatggtatataaaagagataagataacttgccaaaactatagtcgaggcgttattctataatagaaacatatgttctgattttggattaggaaaggggcaaggagtttggcgaagcatcagttccaatataatgaagatgcgattcaagtgttagaaggacttgaagccgttcgaaaacgcccgggtatgtatatcgggagcacggacagccgtggattgcatcatttagtatatgaaatagtagataactccgttgacgaagcgttagcgggatttggcgacgaaatttcagtcgtaatacataaagataatagtattagcgttatagataaagggcgaggaatgcctacgggaatgcataaacttgggaaacctacacctgaagttattttaactgtacttcatgccggtggtaagtttggtcaaggtggttacaaaacgagtggtggtttgcacggggttggggcatcggttgtaaatgccttatcagaatggttagtcgtaacgattaagcgtgacggaaatatttacgaacaacgctttgaaaatggcggtgttcctgtaacgacgcttgagaaaatcgggaagacgaaagagtctggtactacgatgcatttcaaaccagatacaacgattttcagcacaacaaattataattatgaaacattatgtgagagattacgtgaatctgcattcttattaaaaggaatgaaaatttcaataaaagatgaacgaaatgatttagaggatgtatttcattatgaaacgggaattgaagctttcgtttcatatttaaacgaagaaaaagattccattcatccagttgtatatttcactggtgaacaaaatggaattgaagcagaactagcatttcaatttaacgatggctactcagaaaacattttatcgtttgtaaataacgtacgtacaaaagatggtggaacacacgaagctggatttaaaacagcgatgacgcgtgtgtttaacgagtatgctcgtaaagtagcactattaaaagaaaaagataaaaacttagaaggcacagatattcgtgaaggtgtagcggctatcgtttcggtacgtgtaccagaagaagtgcttcagtttgaagggcaaacgaaagggaaactaggtacaagtgaagcgcgttcttcaattgatgccattgtatctgagcatttagcatactttttagaagaaaatcctgatgtagctacacttcttgtgagaaaagcaattaaagcagcacaagcccgtgaagcagcccgtaaagcaagagaagaagcgcgtagtggtaagaaaaagaaaaaatcagaaggtacgttaagcgggaaattaacacctgcacaatcacgtaacccgcaaaaaaatgaactgtacctagtagagggtgactctgccggtggttctgcgaaacaaggacgagaccgacgtttccaggccgtattaccgttacgtggtaaagtaattaatacagaaaaagcaaagcttgctgatatctttaaaaatgaagagattaatacaatcatttatgcgattggcggcggtgtaggaaatgaatttgatgttgaagatattaactacgataaagttgtaattatgaccgatgccgatacggatggggctcatattcaagtattgttattaacgttcttctacagatatatgaagccacttatcgaagctggtaaagtgtttatcgcacttcctcctttatacaaagtaagtaaaggaaaaggtaagagtgaggtaattgaatacgcttggtcagatgaggaattagacggtgtaacgaaaaaagttggaaaaggctatatgttacaacgttataaaggacttggtgaaatgaatgcggatcaattatgggaaacaacaatgaatcctgaaacgcgtacattaattcgcgtgaaaattgatgatgcagcaagagcagagcgtcgcgttacaacattaatgggcgataaagtagaaccgcgccgtaaatggattgaacgtaatgtacagtttggtatgcaagaagaaggaaatattttagaaaatgaaatgattatggagacggaggtggaataacatgcaagcagagaagtttcatgacctcccgcttgaagacgtgttaggtgatcgctttgcacgttatagtaaatatattattcaagatcgtgcacttccagatgcacgtgatggcttaaagccagtacaaagacgtattttatattctatgtatgtagaaggcaatgtacatgataaagcgtttcgtaaatcagctaaaacagtaggtaatgttatcggtaattatcatccacatggagattcctctgtatatgaagcaatggtacgcttaagccaaacttggaaagtacgtaatgttttagttgaaatgcatggtaataacggtagtgttgatggggacccagcggcagcgatgcgttatacggaagctcgtttatcaccaatcgcatctgaattattacgtgatcttgataaagaaacagttgaattcgtgtcaaactttgatgatacgagtgaagaaccggttgtattaccagcagcgttcccgaatttattagtgaacggatctacagggatttccgctggttatgcaacagaaattcctccgcatcatcttggagaagttattgatgctacaatgatgcgtattgataagccaaatagtactgttgatgatttattaacagttatgaaaggaccagatttcccaacaggcggtattattcaggggattgatggtattaaaaaggcgtatgaaacaggtaaaggtaaaattattattcgcggaaaagcagaagttgaaacagtgcgcggtgggaaacaacaaattgtaatcactgaaattccttacgaagtgaataaggcaaatcttgtaaagaaaatggatgaattacgtctagataaaaagttagatggtattgctgaagtgcgtgatgagacagatcgtactggtttacgaattgttgttgaattaaagaaagaagcaaacgccgaaggtattttaaattatttatataaaaatacagatttgcaaattccatataactttaatatggtagcgatcaataatcgtcgtccaacacttatgacattaccgaaaattttagatgcttatattggacatcaaaaagaggttattacgagacgttcgcaatatgaattaagaaaagcagaaaatcgtcaacatattgtagaaggtttaaagaaagcattatcgattttagaccaagtaattgaaacaattcgagcttcaaaagataaacgtaacgcgaaagataatttaagtgcaaaatttggctttacagaagcacaggcagaagcaattgtttccttgcaattatatcgcttaacgaatacagacattacggcgttacaagaagaagcagatgagcttaataagaaaattattgagctacaggcaattttacaaagtgaaaaaagattacttcaagtaattaaaacagatttaaagagagttaagaaaacatatagtgatgatcgacgcgcaattattgaagatcaaatcgaggaaattaaaatcgatgtagaagtgatgatcccacaagaagatgtcatcgttactgtaacgaaagaaggatatgtgaaacgtactggatggcgctcacataatgcctcaaatggcaaagacttcggtatgaaagagggtgacatcttacttgaacgattcgatacgaatacgacagagacagtcctcttatttacgaataaaggcaactatatatatctgccagtatacgaaatgccagatattcgttggaaagatttaggtcagcacgttgctaatatcgtttcactcgaccgggatgaaacaatcatttgggcaacggttgtaccgaactttgaggaagaaaaacgatttatcgtatttgtaacaagaaatggtatgataaagaaaacagaattaaatcaatataaagttcagcgttattcaagggcattcgttgctgtaaacttgaaaaaagatgatgaagttgtcgatatatttgcgacagatggaacgagtgatatcgttcttgctacacacggtgcatatgcacttattttccatgaagatgaagtaagtccagtcggtgtaagagctgctggcgtgaaagcaattaatttaaaagaagatgactatgtcgcttctggtaaaccgttaaatggtgacaaagatcaacttattctcgtaacacagcgcggtgctgtaaaacgtctaaaagcatcagaaattgaaaaatcaacgagggcgaaacgaggtcttgttattttcaaagaattaaaacgtaatccgtaccgcattgtcggtattgaaattgttcgggacgatgaattagtttacatgaagacagagaaaaacattgtagaagagattgatccgaaagcgtatcgaaataaagaccggtatagtaatggtagcctagtgctagatgttaatgatactggtgaagtagtagaaacgtggacgaagaaaagaccagaataaagagggcatcttgctatgaataatagcaagatgcttttttctaggcaatttattatataaataataataatcttgttataataactgaatgaaatcgttctcataaagtgaaactttaatcaatggggattttctttatccacactgattattagttaaaccaatcgggctttaacgagcagttgattcctcacctagttccttagttttcgctgaattttgagttaggaatcttactgcctgttaaagcgggacaaatggaggggcaacatgaaaaaaataggtgtagggattgtaggatttggtttttctagtacgacatttcatatcccactattacaaacgatagaagaatatgatattcgtgctgtattatcctcaaaagaagaggtagtaaaagaaacattaccaaatgctaatgttgttagtacaattgatgaattggtgaagcgagctgatgttgacttagttgttattacatcacctaatacaactcattttccatatgtaaaagaagcaattttaaacggtaagcatgttgttgtagaaaaaccatttgttgtctcaattgaagaaggggaaaagcttatttcattagcagagcagcataatataatgttaagcgtatatcataatcgtcgttttgataatgatttcttaacaattaagaaattgttaggagaaaacagagtagggaatgtatacgcatatgaatcgaattttgatcgtttccgtccacatgtacgtgatcgatggagagaaaaaaatctaccaggctccggtatattatacgatttaggatcgcatttaattgaccaagcgttatcaatattcgggaaacccgatgcgataagtgcagatgtaataaaacaaagaccaggtgcagaggtggatgattatttccacatagtacttcattacggagttaaacgtgtcattttacgtagtagcagttatgtgaaaaaagctggaccgcattttatagtgcatggagagaaaggttctatcgtgaagtacggtatggattcgcaggaagagcaattaaaaaatggaatgaagccaggtgataacggttatggagtagacgatgaagagaattttgctactttagaaacagaagaaagcttagagcgtattccaacagaagtcggttgttatgacaattattataaaggtgtacgagatagtatattaaatggtgagaaactacctgtaacagcaaaagaaggtttagatgttattaaactgattcaattagcgattgaaagcagtgaaaaaggtagagtcatttctataaaataaaaagacacgaaattcgtgtctttttattaggaatatgtgaatatgattaattatttagtttagtcgtttatcatacattaattggatttgtatgccataaggatcttcaataataccatatgcttcactaaatatatttttttctagcggagagattattttcacatgcttatcggaaattaaattattataaaatctttgtatttcttctaaattagcgctttgaatgcaaagtgacatgttatttccaacgttataacgttcattagtattcattgtatcttctgctatcattagctttgtattcccaatttgtaaaacagagtgagcgatatgttctttattttcacttgtaattttaaaagaacgatctcttttcgccagttcttcatacgtaacaaccattaattttttggcttctaaattacgtgtataaaagttaattgcctcctttgcttgcccattcagtgagagaaaaatagctatttctaatgtcataaatttacaactcctttattagttaataattataatatagactaaaaaggtttcaatacatgacacctttcgggaggtaaatatgaaaaaaacggaacgaataaatgatatgcttattttcttaaataataaaagaaattttaatttaaaagatttaatggttagatatgatatttctaaaagtacagctttacgagatattcaatcattggaagaaataggtgtacccatatattctgaactaggtagaaatggaagttataaaattatagaaaatagtgtgttatcgccaatttattttagtgtggatgaaatgtatgcgttatacttttcgattcttacactaaatggatacaagacaaaaccatttaatatagaaagtattgcgcttgaaaataaatttaaacatgtactacctgataatgtgagtaaaaacatttcgattatggaacgaacgctttcctttgaagtaacaaatcatagtaattttagtccgttcttaaaagaaattttacaggggatttttgctgagcgagtttattatttaacatatttaaaaaaagatgaggagaaagtattggtcgcccaatttattcgaatcgaatctaaatttggccagtggtatgctaaaatctttaattttgagacaaatggtgttcaaataattagatgtgataaaattctttctattgaggaaacaagcaacacgaattcaaaaaatcttgaagaactattaagttatcttacaaactttcacagaaaacctgatgcaattgattttagcgtcattgttaatcaaaaaggaaaggacatttttgataaagagaattatccttccatgaggatacaaaaagaaaatgaaaattatagtataacaggctattttaacaagcaagaagttgagtttatttcaagttattttctaaattttggtgaaacgattatttcaattcagcctgtgatgctaaaagagttaatctataataaggtgttatctataaagcagcatttaacttctttaagataaagttagttttagtcattttttgatatgaaaaagcccttgcgatttaaatatccaaagggctttttgatgattttatttgttctttagaaaaattacttttgtggaacagaaagaccatagaagaacatcgtaacgatatcttttatatgtttttcccaatctccttcaagaagttgtgctccaaattcatcacctaattttgtaaacatttgaatgtaaagtaacatcatttctttagtaaggtgtggattaatttcgtttttgcgctgagctcgttctaatatttctaaataccagggtaggattttttcattttgataactataaataaacttacggagttcttcgtccctttgcatcatttgtagtaacatatcaggttgaaataatccgccagtattcatttttcttacaatcattttttgcatcatatcatgaaaaggtaatttttcttctgcaagctctttataatattgaaattcagatatgataaattcttgtataagctccctaaataacgcatctttacttccgaaatgattataaattgtaacttgagaaacgtttgcttcttttgcgatatgttctattttcacttcattaaatccacgttctgaaaataataagaatgctgcttctttaatggcacgctttttcttttcttttactctttcaaagccgttcaatgcaatcacctcacttaaaatatacaagaaaaaataatggaaaacaataattttgaaatatagactgataaatatttcaaaaagttgttgcgaatatgaaagatgaggagtacaataattttgaaatatcacatattaaatatttcaaaaaatgaggtggaattatgatttcagttcaagatgtcacaaaacagttttcgaatggaaaaggtttgtttcatattacatttgatgtaaaagagggagaagtatttggttatttaggaccgaatggtgccggaaaatcaacgacgattcgtaatttaatgggatttataaaaccgacagctggtaaagcgacaattttcggattagattgttggaatgaagcagcgaaaattcaaagggaagttggttatctaccgggtgaaatttcttttattgaaggaatgaacggattagagtttttaaaattaatgcaaggaatgcgtggattaaaggatacgaaaagacgagatgaactgatagagcgtctgcaatttgatgtgaaaacaccgattcgcaaaatgtctaaaggaatgaagcaaaaagtagggatagtcgctgcatttatgcacgatccagaggtgttaattttagatgaaccaacatctggacttgatccacttatgcagcaagtgtttatagatttaatattagaggaaaagcaaagaggaaaaacaattcttatgtcttcgcatattttcactgaaattgagagaacttgtgacagagtagctattattaaagatggtcgactcgtaacagttgaaaatattcacgatttacaaagtatgagaagacaagtgatagatgtaacagtatcatcacaagaagagattgagtctcttacaaagtgtaatttgcaatttgaagcggtaaaaggcagagaggcatctatcattgtacaaggaaactatcaaactgttttacaaacactttcaaactacaatgtaacggcacttcaaacgagagcgatggatttagaacatttatttatgcattattacgataagaaagaagggataacgcatgaataagcaattatttttagctagtttgaaagaaacacaaaaaagtattttgagttatgcgtctggtgcagctttatatctgtggttattaatttggatattcccgtcaatggtatcagcgaaagggctaaatgaattaataggtgccatgcctgatagtgtgaaaaaaatcgttggtatggaaagtccgattcaaaacgtaatggattttctagcgggcgaatactatagtttattgtttattatcattttaacaattttttgcgtaacagttgcgacacatttaattgctcgtcatgtagataaaggagcaatggcatacatgctagcaacacctgtatctagagtgcaaattgcgattacacaagctgctgttctcatattgggacttctgattattgtatctgttacgtatgtagctgggttagtaggtgcagaatggtttttacaagataataacttaaataaagagttatttttgaagataaatgtagtcggagggctcatatttttagtcgttagtgcgtattcatttttcttttcttgtatatgtaatgacgaaagaaaagcactaagttattcagcgagtttaactatcttatttttcgtattggatatggtagggaagttaagtgataagttagaatggatgaaaaacctatcattattcacgctgtttcgtccgaaagaaattgctgaaggatcatataatatatggccggtaagcataggtttaactgctgtagcgctttgtatttttatcgtagcgattgtagtatttaggaagagggatttaccgttatagagtagaaagtccactgagaaagtgggctttttttatttgtaaatttaaactagtatgtttattgcatccttataaaggatatttatctttttaattacaaaaatattcaaaaaagtgaacctttttctaggttcatacgtctaatacatgtaaagttaaattggaagtgatgaagtgaggatgaagcaggaggagcgattgtgaaagtaatccctttatataaaatggttataaaagaagaaacggatgtttctttagcgaaaaaaggtgatcatgaagcctttatagcgcttatacatacagaaaaagtgaagatgtatcgaatagcaaaggcgatgttacgtgatgagacaaatatagaggatgcgatacagacaacaattttaaaagcctatgaaaatataaaaaaattaaaaaaagaagaattttttcacacttggttaattcgaatactaataaatgagtgtaacaatattattagagcgtataaaaatgtaattgtgacagaagagaatgattacaatatgagtgcgtgtgatcagtatgaagatatagatttgtgtaatgcgattcaatcgttacatgaagaattaagagctgttacggtgctttattattatgaagatatgaatcaagagagtatagcaaagctgttagaaataccgaaaggaacagtgaaatcaagattatcacgcgcgagggaacaactacaaaaacgattaaagatggaatagggggtgtaaaggatggataatgaaaaattatttgatgagaaattaaaaaagagaatcaaagatgaaaatgttatagtacctccagagttaaatgaaaagattaatggtacgctacataatcttaaggtaaaaaagaagagttacaaaattcatatgatgataattagtgcagcggtttgtatactttcagtggtatctatgtctgagttttctatacaaagttttgcgcaaaatggtggagtatttgaatatgtaaagaaaaaagcgttttctgattatgaaaatgaagaagaaataaaatcgaatgtacattatccagataaagaaaagattcatcaaaaaatgctagattctattgattattttaaaaatatttcaggacaatttgaggaatattctagctcatcaagaattgctacaacatataagtatgcgattgatacggagaaacaaagaggtatctcttcgaaagaagataaactagccaaaaaacgaacaattatatataacgagggcaagaaaaaagagtttgatgatgagaagtatacctataaagagacaaaatggaacccgaaagaaagaaacaatgaactattaaaattaaatcctacggaaaggttagtgagaaaatcagatgagaaaaagagatatgatgatgaatatgtagggctagctaaatatagtattcaatcagaattcgcagatttattaattcgatataaagattggaattataaagaaacgaaatatcttggattagattgttacaaaattgaaggagttataaacatagagatgcctgttagcacctctgaagatttaagagggaaattcgaaatggttgtggagaaaaatacagggattatgttgaaatttcttagttttcaagaaggcttgattcaatattcagttacgactgaatggatacaaatagataagggattgaaagaaagtatgtttcaaaaggatagcgctaaatatgaaaaaatgagaaacatattggatcaatagaaacaggaggagagtaaatggggaatcattcatctttaagagaagagaaaaataagcaaaaatataaaaagaaaaagataacaagtttactactggcggtattactatttggtggaattggctatggagcctatgtatatatgaaaacttctagtcttgtacaaaaatctaatttgaatttagcacgaggtgaaaaatccaatttacgtgagaaatctgtaaagccaattgcaaatcatgtttcacttttaattatgggaattgatgaaaatcaagaacgacaaaaggaatataatggtgcatttcatacagatgcattattgttagcgacttttaataaagacgataaaacagtgaaattaacaagcataccgcgtgatacatatacatatgttccagttgaaaagaaaaaagataaaataacccatgcatatggaagtggtttcgttaaaaatggtaaagatggaggaccgcaagcttctgtggaagcggtagaaaaattgttacaggtgcctgttgattattttgtgaaatttaattttggttcctttactaaaattgttgatgggttagatggtattgaagtggatgtcccagttgaatttacggagcaaaatagtaaagatgaacctgatgcgattcatttgaaaaaaggattacaaaaattaaatggggaagaagcacttgcactagcaagaacgcgccatattgatagtgatgcaatgagaggacagcgccaacaacttgttattgaagcgattttaagtaaattaaaaagtgtaggatcgattacgaagctagaaaaaatagttgaggcggttgatggtgattttaaaacaaatttagtaatggatgatattttatctttttataaatacggtttaaacggttcagttgaaaaaatacaattagctggtgatgatttatacttacctaatggcccaaacgggaaacgtgtatattattataatcctaataaaaaagatctacagagtttgagtaatactcttagaacacatctagggttaagtgaaaagcaaattgaggagaattaaagcagacgaaatgtctgcttttttatttttgtagaaaagatgtttttacatatatgcattatttattagcaataattaaccagtattcaagcggtaaatgagatcgaagtgattaaaacaacgaatgtgtatgaatgcaaaataaggtttgaacaacatatggaatttttatgaatattactgtaaaaaaataattttttaaaaattttcaataataatactttacaaaaattaaaaaattagtagaataagaattagtaagaatcgtctgataaatatatagagaaaaacagaattatcagaaaattctttaatagctatcgtttagaattagggagggtacagaaaatgaaaaagaaaaaaatgaaaaaactaacagcagttgtagtaccggttttggcaatgagcatggcactaacagcatgttctacatcaggcggagataaaaagacaagcacaaactcaagtggagatagcaagtcagagggaaaattagcggcaaaacaagtgttgaatcgaacagtaaaccaagagattccaacgatggattcttctaaatcaacagatacagtatcttcacaaatgctagggaatacgatggaaggattatatcgtcttgataaagataataaacctattccagctgcagcagaatctagcacgaaaagtgaagatggtaaaaaatatacatttaaactacgtaaagatgcaaaatggtcaaatggagatccagtaacggcgaaagatttcgtatatgcttggcaacgtctattagatccaaaaacagctgctgagtatgcatttatcgcattcccgattaaaaatgcagaagtagtaaataaaggagaaaaacctgtaactgaattaggagtaaaagcagtagatgatcttacgcttgaagttgagttagagcaagcagtaccgtacttcttaaacttagtagcattcccatcatattatccattaaacgaaaagttcgttaaagaaaagggcgagaagttcggtatagagtctgatacaacagtttataatggaccgttcgttcttaaagattggaagcatgaacaaggatggcaattaaagaaaaatgatcaatattgggataaaaagactgtaaaacttgaagaagttaacttcagtgttgttaaagaaccagcaactcttatcaatttatatgatagcggtcaagttgactttgctttattaactggagagttcgtagataaatacagaaataagaaagatgaattcggaacatattcacaagtgagtacgtatttcattcgtatgaaccaaaaacgtgatggacaagatacaccattaaagagtaaaaagttacgtgaagcaattgcactatcagttgataaaaagaatttagcaaacgtaattttaaatgatggatcaaaagaagctgacttcttagtaccaaaaggtttagcaactggaccagacggtaaagacttccaagaaacgtttaaaaatggtttaaaaccaaatgctaaaaaagctgctgcagcttgggaagaagcgaaaaaagagctaggtaaagaccaagttacaattgaattcttaaactacgatactggtaatgcgaaaaaagttggcgaatatattaaagatcagattgagaaaaacttaaaaggtgtaacagttaacattaaacttcaaccatttaagcaaaaactaaaattagaaactgaacaacaatatgatatttcgtatggcggatggaatccggattatgcagatccaatgacgttcttagatatgtttgagactggacattctcataaccaaatgagcttctctgaccctaaatatgacggcatggtgaaaaaagctggaacggaattaatgagcgatgcgaaaaaacgttgggaagagttaggaaaagctgaaaaaacattacttgaagaagatgtagcgattgtacctttatatcaacgaggagattcttatgttttacaaccaaatgtaaagggagtagtaaaacataatatcagtccagaatttagctttaagtgggcatatgtgactgaaaaataatagagttgaaaaagcatttaaaagtggcttagctacttttaaatgctttttttgtgagcttaaaatactaatttttagtgtggttaaatagaggagaataaggtgtatagtatgtacatatagtagatgggggataaatcctactaaattaaaaaaaaccaggatatttaaaaaactatttacaaatacgaaaaaaagagtagaataacattagttataattttctgaaaaataaatctttagtaaggggtctctcaagggttggtaatgtacatataattagggagggtacaaaaatgaagagaaaaaagatgaaaaagttaacggcagttgtagtaccagttttagcgatgagtgttgcattgacagcatgttctgggtcaggtggggaaaagaaaacgactactacatcaaatagtggggaagaaaaaaaatctgatattaaatatgcagcgaaacaagtattaaatcgtacggaaaaccaagaaattccgacgatggatacttctaaatctactgatacattaggttcgcaaattttagggaacacgatggaaggcctatatcgccttgataaagataataagccaattcctgctgcggcagagtctagtacgaaaagtgaagatggtaaaaagtatacgtttaaactgcgaaaagatgcaaaatggtcaaatggtgatcctgtaacagcgaaagatttcgtttttgcgtggaagcgcttacttgataagaatactgcagcagaatatgcatttattgcttactatattaaaaatgcagaagcgattaataaaggagaaaaacctgtaactgaattaggagcgaaggcggtagatgattacacgctagaagtagaattagaaaaaccggtaccgtatttcttaaatttattagcattcccatcatactatccattaaatgaaaaattcgtaaaagaaaaaggtgataagtacggtttagaagcagatacaactgtgtataatggtccattcgttatgtcttcatggaaacatgaacaaggttggcagctgaagaaaaatgataagtactgggataaaaagactgtgaaattagaagaaattaactatagtgtagtaaaagaggttgcaacgaaagtaaacttatatgatacaggatcaattgattttacattactatcaggagagtttgtagataaatataaatcgaacaaagaagaatatggtgagtatgcggaatcaagtacattcttcttacgtttaaatcaaaaacgtaacggacaagatacgcctttaaagagcaaaaaacttcgtgaagcaattgcattatcagttgataaaaaaggattggcaaatgtaattttaaataatggttcaaaagcaacagatcaattggttccaaaaggacttgcgacagggccagatggtaaagattatcaagatacatttaaaaatggtctgaaatataatccgaaaaaaggagcagcagcgtgggaagaagcgaaaaaagaacttggaaaagatcaagttacaattgaattgctaagctatgatgatggaactgcgaaaaagattgctgactatgtaaaagatcaaattgagaaaaatttaaaaggtgtaacgattaatacgaaaattcagccgttcaaacaaaaattaaaattagaaactgcgcaagattatgaaatttcttatgcaggttggagtccagactatgcggatccaatgacatttattgatatgtttgaatcgaagagcccgtacaaccaaatgagttattcaaatccaaaatacgatgaaatggtaggaaaagcaggtaatgaattaatgagtgatgcgaaaaaacgctgggaaacgttagggaaagttgaaaaattattccttgaagaagatgcagggttagttcctttatatcaaacaggaagatcgtatgtaatgaaaccgaatgtaaaaggaattgtgaaacataacatcagtccagaatatagctttaagtgggcgtatgtaactgaggatggcggaaaaaaataaagtgaaagcatttcaaaagtggctgagctgcttttgaaatgctttttagtatgtataagggaataaatctcgttagtctattgagaatcgggtaggtaattaggaaggttctatcggaggaatttagagaggtcagtaagtagtaatacagatgatagtaagagacctcatgctaataagaaaaatatagaacgtagtaatagagtggaataaggggagagatgtttacatatagtagacgggggataattcatatagtagttaaaacaacaagttactataataaaaaaataaatatttagaaaatttacaaaaatactttacaaaatttaaaaaaacagtagaatattaattaataagaattttctgataacgaaagttagtagagaatttctaaatgttaatatcgtacatataattggggagggtacaaaaaaatgaagagaaaaaagatgaaaaaattgacagcggtcgtagcaccagttttagtaatgagtatggcattaacagcttgctctggatcaggagataaagagaaggcaagcacaacaccaaaaagcggtgaaaaagaaggcggaaagctagcggcgaagcaagtgcttaatttaacagagtctcaagagattccatctatggactctgctaaagcgacagaccaagtatcgtttctagctttaaacaacgtaatggaaggtttatatcgacttgataaagataataaagcaacaccaggagttgctgaatcatataaaaagagtgatgatggtaaaaagtatacatttacattaaataaaaatgcaaaatggtcaaatggagaccctgtaacagcgaaggatttcgtgtttgcttggaaacgtgcggtagataaaaatacagcagcggaatatgcatacattatgtttgatttaaagaacgcaaaagcaattaatgatgggaaagcaccacttgatacgttaggtgtaaaagctgtagatgattacacattagaggtagaattagaaaatccagttccttactttgtagaattaacttcattcggaacattctatccgttaaatgaaaaattcgtaaaagaaaaaggtgaaaaatttggtttagaagcagatacaacgttatacaacggaccatttacattaacagactggaaacatgaagaaggatggaaattaaagaaaaatgcacaatattgggataataaaacagttaagttagatgaaatcaactttaacgtagtaaaagatagcggtacacgtgtaaacttatatgaaagcggacaaatcgatcgtgcgggacttacatctgaaatggttgacaaatataaatcaaatccagacttttatacacaaaaaacaccatcaacgttcttcttacgtttaaaccaaaaacgtggtgggcaagatacagtattaaagaacaaagatttacgtttagcgattgcaaaggcatatgataaaaaaggcttaacgaacgttattttaaatgacggatctacaccagcagattacttagtaccaaaagaatttgctaagagtccagatggaaaagacttccgtaaagaaaatggagatattttaaaaacagatgtgaaaaaagcaaaagagcattgggaaaaagcgaaaaaagaacttggaaaagagcaagtaacgattgagctattaaactacgatagcgataatgcgaagaaagtaggagaattcttaaaaggagaacttgagaaaaacttaccagggttaacagtgaacttgaaaaatcaaccgtttaaacaaaaattaaaattagaatcagatttagattatgatttatcttacgctggttggggccctgactacttagatccaatgacattcattgatatgttcgttacaaatggtcctcataaccaaactggatattcaaatccaaaatatgatgaaattgtagaaaaaggtaaaggcgagctattaacgaaaacgaaagaacgttgggatagcttactaaaagctgagaaaatattacttgatgatgctgtaattgcaccattatatcaacgtggtgatgctatcgttcaaagacagaaagtaaaaggtattgttcaccatccggttggtggagactacagctataaatgggcatatattacagaggataagtaagatgaggggcgtacaatacgcccttttttctatgcacttttcttccgtgctcgaatatataaaataaaaaagggagaatcccatgaaacgaaacacatacatcgatttcctagcttattacggaataggaagtgctcatcctggtggctttacgttaacaaaacaattgttagcacaactgccttttaaatatggagcgaatgtccttgagataggttgtggtacggggaaaacagcggcgtatatgacaagggaatttggctataaagtaacaacggttgaaaagaatgaaattatgattcaaaaggcaaaagatagatggttgtttgaagggttagatatacaattaattgaaggaaatgtagagcatttaccgtgtttgaataactcatttgagttcgtacttggagaatcaatcatcgcttttacagacaaagaaagggttatctcggagtgttatcgtgtattacagcaggacggtaagcttgttgtcattgaaatgattattgataggcacattgataagggtgaggaagaaaaaatcgcccaattatatggcatgaaagaactgttaactgagaatgagtgggtacaattatttcagaaagcaaattttaaaagaattacaattgcgggtggtggcacgattgcagaaacaatctctggctatgtagaagagccagaatggaatgtatcctcacatattccgaatgagttatatgaggcgtgggcacagcatgaaaatgtacggcttatgtaccaacacattttagggcatcgtatttttatatgtgaaaaataaagaaaaagagttggctaaaggtagccaactctttactatgttaaatgaaaaataatgcagctaatgtaattccgaagatgaaaccaaatccgagttcaacaccccagccacaaccgccgcctccccagccgccgcaaccacaactactacaaccacgaccaccacatccgcagctgctgaatccaccaccgcatccgaatccacaactatcacacctgctaaggcctccacaaaggtcacaaccaccgtttgcataagcgtcgtagtatccgaaccctgaatcaaaagatgagcgctgttgcaccggttcgatccatacagagttttgtgtcacatcgattattttacctaaatgtatacggccatcacggtcttcaatccgaacaacttttccgaaataacgttggcatgtatcataacatttttgtctatgcatattctttcctccttccgcattacagtaatacgatatgtaagggggacaagtgcggcttgtacgaatgccctatctatcataattgttataggaaaggggaaatataagaagaggatatataaggaggaaaaggcatgaaatctacagatcagtttcagacatacgaagtaccatgggaagattttattgaagcgttacgagaggaaatgaagaagcaagtagggacagatattattgatacagtagtttgcaatttagaagatggttttgaagtgtatacatatgtgcagggggatttagattttgaatataaggaagcgcttgagagaaaatacggaagtgatgcgaagacacctaatgtgttaacgataatgttattagctagtatttataatacaagtgaagagaatatacgcttgcatgcggataataaagagaatccgattgttgaagtgtatgtaaagcaatgaaacacgctgtggaaggcgtgttttttatttgtatgataaaatgttagaaaattgagaaagaaggtgaaggattgggaattaaacatcttaatttaacagttacagatgtaacagcagctagagagtttttagagaagtattttggtctaacttgtagtggaacaagagggaatgcctttgcagttatgcgtgataatgatggatttatactaactttaatgaaaggaaaagaagttcagtatccaagaacatttcacgtaggatttccacaagaaagtgaagaacaagtagataagataaatgaaagattgaaggaagatggatttttggtcgagcctcctaagcatgtccatgcgtatacgttttacgttgaagcacctggtggatttacaatagaagtgatgtgttaagtcaaaaatcaaactttttgttatgtgtttttaaaataaaaagtaggaaaagtctgttttaagtgtggagcttaaacaggcttttttacttatagtatcggatagaaaacgctagaaggaataatattcagttcttataactgtttacataataaaattatgctgggttcgttgtcctaaaatacaagtcatatatcttgtttcctctcataaatttaaacataggaatttgtctacaaaggtggcgaagcctcatcatgaaaatccgaatttgtgccacgttcatgttgtttctatttatatgtttacctttatcagcttttgcaaaaggagaggaggcaaaggaaagggtcgtttcacttgtatatgacgattcgggcagcatgagaaataacgatcgctggaaatatgccaattatgctttgcaaagtttagttgcgctattggatgaaaaagataaattttcttacgttccaatgagtaagccgaatgagccattaaacatttcgttaacgaaggataaaaggcaaacagaaattgagggaattggagcatggaaaacgtatttaaatactccatttagcgcggtagaaacggcgatgcaatctataaaaaaggaagcagatatagatggaaaacgtgaattttggcttattgtattaactgacggggcatttaatgatttagagaaagataaggttggcggaaaagaacaaattttgcagaaattagcccagtttaagaaagaaatggatgcaaaaaagatatcgttacatccagtcttaattacgatggaagaagatttaggacaacaagaaaaagaacaactaaatacgttcaaggaaatatggaagaaagagataaatggtgttacgatgccgtcaagcggagaagatggcattgtaaaaagtgtaaatcaagtggcagcattagttgcaaatcgtgatccattctcctctgttgaatcgattgtaaaaacgaaagtagtggggaaaagagtagagattacaacaccgtttccgttaaagcgtatgacgcttgtacgacaatcgccttctctgcccgattatcaggtcacacaaatttctaaaccattacaattacaatcttctttttccatacatgcaccaggagaagcaaagttgttcggaaatatagttcatataagtacggaaaatgaggaagttattaaaccaggaacttatacgatagaagtggaccgagatattgagaaagaagggttacaagtactagtcgaaccggcacttaattatactgtttctacttatgataaagaggataaggatagaaaaaatgttgaggaaatgtatgaaggtgtgacagctgttattgaagcaaggcctacggagttgccagttcagtcttcttactttcaggcagaagtagaaatagacggaaaacaatatgcaatgaagtggaacgataaaaggcatgtgttttattacgaaacgaagcttggtaaagggttagtacgcgggaaagttcatatgaatataaaggggttttatagacagacgaaagaatttaaaattgaaacagctgagaaaccgaaattatcacttcaaactgttacaaaagattatgaagaaaaagtgacaaatttagagaatagtaaaccgtttattatacaaccacagttagatggtaagccgatgacagaagaggctgtaaagaaactattaaaatctactggtgtcacatctaaacaatcaatcaactatgaaataaagcaacatggaaatcaaatctatgtttatcctcgtccctattactccgacacatttaattttacagataccggcaccgtagaagctaccatcgtaatgcaggattcaaagttacaagaagtaaagaaaaacataacattccatattcaagatgctccgttttatgaaaaatatgcgcttatttttaagtttgtcattcctatcactttattactgttagtagtaggaatcattgttttaggatggattgttcggccaagatttcaccggaaagcactactgtattatgaatgggatcaagaggtagcgaaagattggctatatcaatctgaaccagaattacttcgaaataaatggtggaaccattattttgggatcccatttagagcagaaagaaaaactgtgcaatccgttacatttatagcgaagaaaggttcgaaatctgtctttgtagcgaaagaatcacaagtagttggaatgattattgatggaatgtttataacagaggatgaagtaggaatggaacataagacactatatccaaatgaacttttactaattgatagaggatatggtaaggagatttacaagtacgaatgtgaatagtaggtagggataagaaggggatggagtattcattctctttcccttttttcaaacaagcaagaataggaaggtggttcacatgacattacaagttccaacaatattaattggtttaggtggaatcggtagtactgtgacgcatcaaatatatgaaaaactgcctgaagagcgccgaaaaaaggtagcaatgcacgtatttgatacagatgtgaatacattaagtaaatttgatcatattcgaaagtttaagacacaaacaagttctagtaaaacgcctagggagtatattgcaggagatccaacgatcccagagtggtttccgatggatccgactatacttgataagccattaacagaaggagcaggacagttacgcgttatttcacgtttagcgttacgtgctgcgatgaaagaagataaattgacgtctttttggcaagaaatcgagaaaatttttccggttacaagtgatcaaacggaatatggtgtgcgtgtcattatagtaacatcactagcaggcggaacaggttcagggatgtttctgcaaattgcattatatttacgtgaaatgcttcggaagaaattgcagcatcataacattttaatacgcggtgcgtttttaatgccggatgttttagtaaagacgagaacagttagcgcgaaagaatttgaaacggtgcaagcaaatggctatgcatcgttaaaagaattacatgctattacgctcggttctactggagaattatcaaaacgcggcggtgtaacaattgaattagagtatcgccctgatcaagtagatgaagacggaagaacgaatcatacaattaaacaacatcatttaccgtacaattattgtttcttatacgattatgaaaacctacatggacaccatttacacaatttatcagattatatggaacagatggcaaatacaatttatttacagttatttagcccgatgtccacaagtcattttgcacaagaagacaatcaaattcagcaattagcagaatcaagcggaaaaggacgatattgcggggcaggaacggcaaaactcatttatccgtatgagcatgtgttaaaatattgtgctttaaaatgggctgtgcaaggtttagatgaatcgtggcttcatttagatcaactgtttcaagagaagaagcaaagatatgaccaagatgtaaaacgtgggatgcagcgtgaaaagccggagagaggtaaaagttatttagaggacttggaacatcttgctacccgtccagagcaagctcatattttctatagacaaatgtacaatgaaacacgtgaaggagcagagggtggtaagctcggagttgcgaaatcaaaactgtttttagaagctgtagaaagttatgtacaacgaacggtgcaaaaagatgaggaattaaatcgtctgcaacatgagtgtaaaatttcagctgcgaaactgaaaatgatggaacaaatgaaaggtgaagtggcaagagtggatcatgcggttcgtttatatgcgtatgcgattccgagccgtgtacatgaacatgtaacgacacttttatatgacatgattgaatcagaccgcttttcaccaagtggttctgaagggcagtcctatcaattaaatacatggtttttaaagaaaacagatccagttcacccagtagcagcacgttttatgttatatgaaattcgaaagcagttagtggaaaaaatgaatcgactacatgaaaataatgaacaaaagcgaaatgtaattcaaaactacgataaaaaatttaatgtgggtaatatcgatggaacggtaacggctgtacgccgagtagaaattgctcaacaacaaggctggtttggaaaaatgattaataatcagcaacgtttattcaaaagagaatttgaagacattataacgcaatatgtacacaaattaaatgaatatcgaaaagaaatgctattagaacttgtatatcaatcgctatatcaagcagttaataaaatgattcaatattgggaaagattttttgataatttacatgaaacacgtgaaaatttactgtttgaaatccaaaagcgcagtaaggaatttgaagggaaaacaaacccgacgaatgtatatgtattagctgaagaacagctgcaagaaaagatatggcaagatatgcagcaacatttaaatttaggtgtactaccgaaagatatatcagcggaaatttatatgagtttgtacggggaatattgtcgtgatgcgaaaacagaagagattcagtcgaaaaaggtagaggatttctaccgagaacatatactgagctattgttatgacgaactgcaagtacgctatcgtgataaattagaactgaatatcattgaagcgttgcgaaaagaagcagattataagaaacgtgatcgcgatgaatacgttcgtgaaaaaattgaagacctgttccatttagcgagtccattcgttccgaaagttgctcatcatagggaattacaatattggggtatacatccttctttaaagaaagagctgcaagaggaattaattcaagaaatgtttaaagaaaaagatacagtacatgaagccttttcgccatttgaagtaatctgttatcgagcgcattacggcttatcgctgcaagattttcctaaattatcatcaggacatatttcaaacggatttatgaatgataaaggtgactatttccaatcgtattatcgccgtgtaaataaattaaatagtaaaaaatctagtttaacgccgcatttagataagtattggcacttaccagcctttatgccagatttaaacgcgactcaaacaaaattagattatgataaatgtaatcgtgcattactatacgcatatatgtatcgctggattagtttagttgctgttgatggacaatttgtgtatcaatataacggtgtaggacgtagctttttaattcagtcgatggggaaaaatatttcaagcgaaagttataaattacacagagcattgcttcataatccgtttatttatgaaaacatcttgtcacgatttgaagaagagcaagaaaaggcgatgatacaaggtggacatttatatacacatccgttcgtattaggagcccaagatgtaagatggcttagaaaagaacatgtccacaatcttttagatatgattttaatgtatgaccgtgaagcgaagtatgatccgacattagaagaaacatcagatgaattattaagactattcctcgatgaaatcgagttgtatttccagaactattacggtacaggtgccgatatggtggcaaagaaagagaaagaaatgtttattaaacaattgtgggatcgctcgcatgcaaaaggatatgtagatccaaatagcgctccgtataaaaaatggcaaaatttattaagtgttcaagatgaagaagaaacgccaaaaacgaatgtataatgaatgaaaagggaatccttaaaagtggcaatacaactttagaaaagagggattctgatgccgtttttaggaagtgtatatcaaatatttgggttatatccggaactttattatgggatgatttcagcagagttgcaagaggaagctcagaaggagcatcttgaaaatagtagtgcagaagctgaagtggaagaataaaaaaaagtgcagatgaaaatctgcacttttttgttagtattaaaatggtgacataacctcaaatgaattattatttttgaataataattcatttgaggttattatgattttcattacattgtatgtaatgaaaattgtatgaaaatcaatgtaataaaatgcatatgaatattaaggtggaaaacaacaatgtttttgagaaaataattatgtataaaaataacatttgatacataatcagccgattatttttgagtgatttattattgacaatataattaattgtatgataaattcaatcagcattcttaatggttttttggtatggttaatattttgaaaattcaatacggtataaagagattgatttttctgtttttattgagacgggttactaagtctataggggaagtgaactatgtatatttttatttttaaaatagaacagtaataaagaatgtaacaagtaagagataaacttgaaaaagaggtttcaaagaatgagtcttttcataaagaaagcaatggatgaagaaaagaaaaaagtattgaatcaaactttaggagcgattgatttaactcttttaggtattggagcaattattggtacaggtattttcgtattaactggtattgtagcagcgaaacatgctggtccggcgattgtattatcttttgtattagcggcaattatatgtgcatgtgtagctttctgttatgctgaatttgcatctacagttccagtttcgggaagtgtatattcatatacatatatgacactaggtgagatttttgcatttatagttggctggtgtgttatgctggagtatttattagcgacttctgcggttgcagcaggctggtcagcatattttcagtcattgctactaggttttaatattcacattcctacggtttttgcttcggcaccaggaatggggaagggtggaatcattgatttaccagcagttcttattattttagttgttacatttttattaagccgtggtgcaaaagaaagtgcacgaattaataatataatggttattattaaactggctgttattgtaggatttattgttgtagggacacaatatgtaagaccagagaattggcaaccatttctaccgtttggttttcacggtgtggtagggggcgctgctactgtattttttgcttttttaggatttgatgcagttgcaacagccgcagaggaagtgaagcgtccacaacgtaacgtgccaattgggctacttgtttccttgttcatttgtaccgttctatatgtaggtgtttcattcgtgctaactggaatggttccgtttacggaattaaatgttgctgatccggttgcatatgcgttgcgcactgtaggagaagatagaattgctgggttgttatcggtgggagcgatagcagggctaacaacagttctgttagtagctatgtttgcatttgttcgtgtatcttactcgatgagtcgagatggactgttaccaaaaagactttcaagtgtccataaacgtttacaaactccattttttaatacgtgggttacaggtatactagcagctttattagcgggattagtggatttgaatttattagctaatttagtgaatatgggaacgataacagcatttgtgtttgtatctatagctgtcattgtattaagaaagacacatcctaatatgaagaggccattccgtgcccctctagtaccttttttacctatcgtttcaatagtaagttgtatatatttggcattgaacctttctaagcttactttaattagttttgtggcatggattataataggggttttcatatattttgtatatgctaaaaaacatagtaatgttagaaatagaaataaagtatagtccattgaaataatacttgtaatggaaatgaaaacacgctacttattcatataagaacaagtagcgtgttttttctatttaataatcccattttctaaaattttaatagttggtgccactttcacattagcttttgaaaaggcactcggccaatcaacttcgacttgtttccattctttatattgaaacgctctcgcataatcaccaaatccgaatggatcaagttgctgtttttgaatgttgtggattaaatcgttcaaatctttgtttagttgttttgtaataagagaagttaatttctttctatctttgtctatatccatattgaatgtaagttcagagacagcaattttcaaatccattttaacatgaaatttgaagtggttatcgctataatctgtatggatatcacgatccatgctaagaacatttattgttacgaaatcgccgccatcggtatcttttaaatcactattactttcaactgaagtagaagggattttcaatgtaagcgaaaccggtgtattcgctttcttttgtaacaaaagaagaagggcgctttcataacgatttaatgacattttataaattccgcgagaagttaatagcgcggaaccagtaacgataacatcctttttacctttttttatttctgaaatagcaggtgttatacctttattaaacgtttgcctgtgaaattcatggaatgtcgtaaaaacggtccgattgtacagtttgttcgtattaattaaatctgttaaatactcgggaagggcaggcttatctttaaagttattatatataactgaagaaattggaccgtctactgcaaccatgcgcatgtttccagtgtttttaggatcacgataccaaacatcaaggtaaggcatagccccttcttgttttaaaaaatttgtgctaaataaaatgagctgtaacttttctgtagatactaaaccgccacttgaactattaaacgttgcttttgcttctcgaggtgtacgtactttcgcttcatgtgtttcgtactttttttctacgtcttcattaaaaataggatttacgtggtacacaattaattttccttttgcttttgcatcaaagccgtaaattaatgaaatcgattgtttttctaagtcgagtcgatctccacagcctgttaaaaaggttatgagaaagtaaagtatagtgaaatgaataaagcgcctcatttaaactctgctccttttccaatgctgataaagtgtcatgtataagagaaatacgaccgggaatagaaaaacgataaaataacttgcagttccccaaaattctcgcaacgcacttatttggtaagaggaagggatataaaagaataagatgaagatacacccgaataataaaccataaataggtaatgaactcctttttttgttaagtaattgattgattccatctgaagcagtaaaaatataaggaatgcaagaatcaaaaataataaagagataaaatgacaaaaagataatttcaaatcgctcaagaaatgagaagtgaaatggtgtaacgagagaaagggtaggccataaaaacttagttataccatctgggctaaaataaaggaaagaaacgaacgtcacttgcaggtaaacgaataaagtaatcaaattcgcaagaacaatccctttttttgcagatgatttattactgaggtaaggataaaggacgaatgcaaactcaaatccgagaaaggcaataatagttgattttactgtgttgaaaactggtatccatccctctttaaggagaggaagaagatagatccaatgcccatctttaagtgggataaataatagtaatggcatccagagtgtaaataagacagtaaaaacagcatagcggctaataataagaacacctttatatgcgagcattaccattggaatagataatagcatcatgattaaaaacattggagatctaggcaaaatccaaatgtgaataacgtataagagggaaaaaattaaagaaaccgctgcaagaacagcatataaaatccaaaaaatcattcctactcttcctaaccattttccaagataacgagttagcacatcaagtaaatggtaaccaggatgcttctccatgatttttacaatacatagactgaccctataataatagacatccagccatctgtattcgccccttgggccacttcacgtggcagtgtaagtacaccgaatcctacttgaacaccactaatcgttaaaatgtattgaaataaactaatctccctctttacacgctttgtcacttatcttcctccttttcttctatatccggttgtcgattttcttgttttaagttaagggatagtggtcgtttcttcattagtttccatggcaaacgcacaagaacgtcttttaaatccgtagcaaatgatggagaaaaaggactaccgtaaggaacaccaagtgagtccatagaaagaatatggatgatgataactgacattccaaccataattccaatgactccgaataaagaagcgattatcatcattggaaagcgaagaatccgaactcctgctgacatttccagattgggaatgataaaagaagcgactgcggtaatagatacgacgataaccataacattacttacgattcctgcttgaactgcagcttgtccaataacaatccctcctacgacgccaattgtttgtccgacgggaccgggaagtcgaactgcagcttcgcgtagcatttcaagtactaattccatcaaaagtgcttctaatataggcggaaaaggaattttggctcgagattctccaattgttaacaataatttaagtggaattacttcataatgaaaggaaatcatagcaatataaagagcaggagcaaatattgcaataaatagtccagtgaaacgaaggagtcgtataaaagatggaatcataggtctgaagctgtaatcatctatcgtctgaaaaaaggatgaaaaggtcataggtcctattaatacgcctggtgagcgatctacaataacggcaattcgcccatctagaatatgatgtgttgttgtgtcaggacgttcagttattgataattgcggaaagagagtaaaggaattatcttcaacaaatccctctaattcaccagtagtaagaatcgcatcaacttttactgactcgatacgggatgccatttcttttacgacattttcgttcgcaacatctgctagataaagcaaaaaaacctttgaagtagctcgttcaccaacagtgaattccttcactttcaattcgcgatttggaatatatcgacgaataagtgcaaggctgtcgctcgctacttcattaaatccttcgtgtgagctttttatggagctctctgttgtaggttcttcaatgctcctttttggtgccgcttgcgtatcaagctctaaagcggatagttgcccgtttataaataaaatacttttgccgtgtaaaagagattgttcaatgtctgtccactgttgaacttttttaatatttccgatagaaacagaggcttcccaaaaatcgtcttcattccactctttaaataagagaggacgaagaatgtttacgttaataacagttttgtctacaagtccttccatatatataagtgcagcttcctgtccgttttttaatggaaaagtgcgtgttattaattctggaataccgctaaacagtttggacaagtgctttaaattaagggaaagggaagaagagatagatttatttaatgtgtgattagcttgctcttgggtagaaaaagatttttcaccacgaatccatttattaaaagaccccatttgttcgcttactccttgttatgttttatatggattattatggatagttacaagctgacatatgcgtagtttaaattttatattgtatatttttaactttaacgctataattatagtgttaaagatggaatcgtgatatgacctgttatgaatctatcgttttatttatgaataaatggattggtattttagcaagatgtgctaataaactactccaccatgatgatagcgtgccaaaaatgtggtgcgtatattttcgtggtggagtttttttattctcaaaaagggggaaagaccatgaatgacaacatggttcatattacaattgacggaaaaaagtatacagcggagcctggttcgacgatattgggtgttattaatgagaacgggattgaacatccgcaaatttgttacgtgccagaagtagatcctattcaaacatgtgacacttgtattgtagaagttgacggaaagttaatgcgttcttgttcgacgatagcaacggaaggtatgaacattgaacgtgcttctgttcgcgcaaaagaagcacaaacagaggcgatggatcggttactagaaaatcatttattatactgtacagtatgtgacaacaacaatgggaactgtaaactgcataatacagcagaattaatggaaatcgaacatcaaaaatatccgtatgaaccgaaagtagatgtaagtgaagttgatatgacgcatccgttttatcgctatgatcctaatcaatgtattgcatgcggtcaatgcgttgaggtgtgtcaaaacttacaagtaaatgaaacgttatcgatagactgggaagcggaacgcccacgagttatttgggataaaggagtaaatattaatgattcttcatgcgttagctgtggtcaatgtgtaacgatttgtccttgtaacgctttaatggagaaaacgatgctcggtgaagctggatttatgacgggattaaaaccagatattcttgaaccgatggtagatttaattaaagaagttgagcctgggtatagcggtatttttgcggtatcagaagtggaagcggccatgcgtgatactcgtacgaagaaaacgaaaacagtatgtacattttgtggtgtaggttgttcgtttgaagtgtggacgaaggggcgtaaaatccttaaagtacagccatcttcagatgcaccagttaatgcaatttccacttgtgtaaaagggaaatttggttgggatttcgtaaattctaaagaacgaataacaaaacctttaattcgtaaaaatggaacgtttgttgaatctacatgggaagaagcactgaatgtagttgcaaataaattaggcgctattaaagaagagtacggtaaaggttctattggatttatttcttcctctaaaattacaaatgaagacaattatgtaattcaaaaattagctcgacaagtatttggaacgaataatattgataactgctcacgttattgccaatcaccagcaacggatggtttgttccgtacaattggtatcggcggtgatgccggaacgattaaagatattgcgcaatctggtcttgttattattgtgggatgtaatccgacagaaggtcatcctgttctagctacacgtattaaacgtgcacataaattacacggacaaaagttaattgtagctgatcttcgtaaaaccgaaatggcagagcgatcagatgtctttattagtccaaaacaaggaacagatcaagtatggttaatggctgttacgaaatatatgatcgatcaaggttggcatgatcaggaatttattaatgagaatgtaaacttctttgaagatttcaaagagagcctagaagaatatacacttgaatatgcagaagaagtaacaggtatttcaaaagaaacacttattcaaatggctgaaatgattcgtgatgcagatggtacatgtatcctttggggtatgggggtaacgcaaaatacaggtggttctgatacttccgctgcaatttcaaacttacttcttgcaacagggaactatcgtcgtccaggagcaggtgcatacccacttcgaggtcacaataacgtacaaggtgcttgtgatatgggtactttaccaggatggcttccaggatatcagcacgttactaacgaaatggaacgtgcgaaatttgaaactgcttacggagtgaaaattgatagtgaaccaggtcttaataatattgaaatgcttcacgcaattgacgaaggaaaaatgaaagcaatgtatcttgtcggagaagatatggctcttgtagattctaatgcaaatcatgtacatgaagtgttatctagccttgatttcttcgttgtgcaagatgttttcctttctaaaactgctcaatatgcagatgttgtattaccagcagcgccatctcttgagaaagaaggtactttcacaaatacagagcgccgtgtccaaagattatatcaagttcttcctacgctaggagacgcgaaaccagactggtggatcgtccaggaagttgcgaataaactaggtgcaaactggaattatagccacccaagtgaaatctttgctgaaatggcaagtttatcaccattgttctcgcaagcgaactatgaagtgcttgaaggatggaacagtttccattggggaagttttgatggaacaaatacaccacttctgttccaagatggatttaacttcccagataaaaaagctcgttttgcgattgctgactgggtacgtccagctgaatttccagctgagttcgaccttcacattaacaacggtcgtatgcttgagcatttccatgaagggaatatgacaaataaatcaacaggtattcaaacgaaagtacctggtgttttcgttgaaatctctccagaccttgcaaaagaacgtggcgtaaaaacaggttcgttagttcgtcttgtctctccttttggagcattaaaattacgtgcactcgttacagatcgtgtaaaagcgaatgagttatatttaccgatgaactctacagataacgaaacggcaattaatttcttaacaggtcctgctgtggatgtacgtacgaatacacctgcgtataaacaaacgaaagtgcgtatggaagtgttagaagttgatggcgaaaatccgatgccaaaagcgaacccacgcaataaaaaacgtcaccctcaagctggcattgaggtacatcgtaagtgggcacgtccagggtatgtgcatttaacggataagtaggaggagaaaactatggctgcacctataaaaatgattcaaaaacaagaattaactgaggaagaaataaaacagcaaaaattagatgatttaaaggagcttttaactaataatgaagaagctctaaatcagatgtttaatatagtaggggaattaaatgacattggaatgctagaagctgcaaattctatgctgaaagcgaaagaaccaattgcaaagatcgttctaggtcaagtaactcgtgagcctgttacaaatttaattaataatatgatgggtgctgcaggggcgttaactgaacttgacccagaacttacgaaaaagcttataggtagtttattagtcgggctagaagaaggtaatgaacatctagaaagtaataaaaaagtaggggtattcgatcttatgaaagtattgaaagacccagatattaaccgtgctatcgggtttgggcttcatttcttaaaaggtatggggaaagggttaaaagacgaataaacttcatgaagtgaacctttccgcctaaatatttgtacgaaatagtttgggcggaaggctcattttggtaaaatatataataaagtaaaatgaggcttttgggaggtatgattgtatgtcaaaaaaagtacatgaatttaatgatatgatacgaaaacttcgaaaagaacttttcggaaaaggaccagaacgaattcatactgtttttgcagaaaatatggctatagcgactctttatggaaacttaacacctactgaaaaatttatttcaagtacgatggacggtgcggaaatggttcatatggctagaacgaaaatgattcaagaggtgtatgctgtgaattcacgtgaacatttggaggaacttgttggagcgaaattagtgaatttgttttcagatatgaaagtagaagaagatattgcagtttctgtatttgtttttgataaaaatataacgtgagagaaggatactgatcgtgaaaccgatacaggtagaaagagaaatctttcgttatgaacaaggagcatttaaacatatagaggacagcattgtaacagagtttcctgtcaccattaaaatgaacggacaggagtttgttacaatggttagtactccagaatatatagaagatatggtaataggcttcttagcgtctgaaggaatcattcggaagtatgaagatattgatagtgtatgggtgcaggagaaagaaggatttgtgcatgtaacaacgacaaaagtaaatccgtattatgaacaaatgcaaaataaacgctatattacgtcttgttgtggtatgagtaggcaagggtttgtttttgcaaatgatgcactaagtgcaaaaaaaatgaagggtgtccatgtacaggttgctgcagaggattgttttcggttaatgaaagaaatgcagcaatctgcggatacgtttcatcatactggtggggttcataatgcagctttatgtgatgtgaatggtattattttaagtcgaatggatattggtaggcataatgcattagacaaaatttacggttattgtttaagaaacgatatttctataaaagataaaatcattgtttttagtggtcgtatttcttcggaaatattattgaaagttgcaaaaatcggttgtgaaattatactatcaaaatcagctccaactgagttagctttgcaactagcggaagatttaggtattacgacaataggatttattcgtaatcactccttaaatgtatatacccatccagaacgtgttttaaatataaaataaaagtgaggcaatgaagatgaaatcagttacattagacaagttgcaacgtccgttaaaggatttacgcatttcagttactgatcgctgtaattttcgctgtcgatattgtatgccagaagaaatatttggtcctgattactcgtttttgtctaatgataaaattttatcttttgatgaaattgaaaggataacacgtattttcgtttctttaggtgtgagaaaattacggattacgggcggagaaccgttacttcgaagagggcttccaaagcttattgagcgccttaataaaattgatggtgtagaagatatcggtttaacaaccaatggatcgttacttaaaaagtttgctcctgatttatataaggcgggactatcacgtgtaacagttagcttagattccttagaagaagagcggtttttctatttaaatggtaataggagcaaagtgcaaagggttctggaaggaatacaggctgcagctgaagttggaatgaaaattaaaataaacatggtcgttcaaaagggaaaaaacgaacaggacattttgcagatggcgcaatattttaaggaaaataagcatattcttcgttttattgagtatatggatgttggaaattataatggttgggatttaaaagaggtcgtctctaaacaagaaatagtagatacgattcatcaagttatgccgttagaacggatagaagcaaattattctggtgaagtggctactaggtatcgttatataggaagcgatgaggaaataggtattatttcatcagtaacagattctttttgctcatcatgtacgagagctcgtatttctgcagaaggaaaattatatacttgcttatttgcttctaaaggaaatgatttaagagaattgcttcgttctgaacatacagatgaggacattacagatgtagtacgcgatatatggaataatagggaagatcgttattcagatgaacgcttaaatcatacaaataagaaaacaatacctaaaattgaaatgtcacatatcggtggttaatatataaagctagcttcatagtgaaaaatggaaaatttacaagagttgtggattttctattttatagtaaaagtgatgattgatatctctgtaaaagatgtgcagagaaattaagcagcattcaaaaacctttattttgaggaggttttttgaagctgcttttttatttggagaaaatggaggaatgggtaatggcatttcataagccggaacaaattgctgagcttgtcattgaggccggtgttcaaaaagtaagacagacattgccagcgatgcttattctcggttttttaggaggagcgtttattgcgataggttttttacttaacattcgagttttagggaatttacctgagcgctggggaagtctagtgaatgttttaggaggagcagtatttcctgttggactcatgctcgtagtattagcaggaggagaattaattacgggaaatatgatgtcactgtctatggcgctttatgcaaagaaaattacattgataagcgtactgaataactgggtttggattactctcatgaattttattggggcaattttcgttgcgtattgctttgggcatcttggcggattaacagagggagagtatttaaataaaacggtagcgatagcggaagggaagttacatgaatcatttgggagaactttaattttagcaattggttgtaattggctcgtttgtcttgctctttggctcgcttacgggacgagtgattttgtcggaaaaatcatcggaatttggattccaattatggcatttgtagtgattggatttcagcaagtagtagcaaatatgtttgtcatttccgctgttatttttgctggtcatctaacgtggatggatttggctaaaaattttgttcctgtttttatcggaaatgtaattggaggagctgggtttgttggttttgcttactttgcttgttatcagaaacaacattctaatatgaaatagagttcttgagaggaagggtatgtaatggctgatcggtattcacgacaacagttgttcaaaccaattgggagtaaaggacaagaaaaaattcgaaataaacatgtgttaattgtaggggcaggcgcattaggaagtgcaagtgccgaaagtttcgtacgtgcaggtgttggcaagttgacgattattgatcgtgactacgttgaatggagtaatttacaaaggcaacaattgtactctgaacaaaatgcgagagagaaaatgccgaaagcaattgctgcaaaaaatcggctagaacaaattaattcggaagtacaaatacatgctttcgtaatggatgcaacttcagaaaatatggaaggtctattaaaaaatgtagatgtaatcattgatgcaacagataattttgatattcgatttgtaataaatgatttatcacaaaaacataatattccgtgggtatatggttcttgcgttggatcgtatggtatgagttatacaattattccacaagagacaccgtgtttacattgtatgcttaaaaatattcctgttacaggtgtgacatgtgataccgctggaattattagccctactgttcaaatcgtcgcagcatatcaagtggcagaagcactcaaaattttagtggaagatttctcagcaattagaaaaacatttttcatgtttgatatatggagtaatcaaaatcattttataaaattagggaaaataaaaacagacgcttgtctctcatgcggttcaaatcgaacttatccttatttattatacgaaaatcaaacgaaagcagctgttttatgcggaagaaatacagttcaaattagaacagtagacaataggaaatacaattttgatgatatagaaaaagtattacaaaaactggggaaagtagatcggaatccgtatttactatcttgccaattcgatgattaccgcgtggttgtttttcgagatggtcgtgtttttattcatggtacaaatgatatttcgaaagcgaaacaactatattatcgcgtattcggttaatagagagggtgtcaacaatggaaagaagagtgccaattacggttgaagaagctgttcgtaaagtgatgggatttgctgataaaggcttaaaggagctattaccaattgaattagcttatggacgtatattagcagaggatttagtagctgaccatgatgtaccgtcatttaatcgttcgccatatgacggatttgctattcgagcagaagatactaatttagcaagttatgaaacgccaattgtatttgaagtagtgggtgaaattggtgcaggatcgctattccatgagaaagtagctccgtttcaagcagttcgaattatgacgggagcacaaattccgaatgggtgtgatgcggttgttatgttagagctgactcgtcaatatgagaagaatggcaacaattatatggaagtgaagcgatcattcaaaaagggcgacaatatttcttttcaaggtgaagatgctcgtaaaggaacggttcttgcaaagaaaggatcgtacattaatccaggtatttcagctcttcttgctacattcggttatagtgaagtaccagttgcgagaaagcctgtaattggactgttagcgactgggagtgaattactggatgtcaatgattcattacagccagggaaaatccgaaacagtaatacgtacatgatattgtctcaaattcgaagagcgggcggaagagtaaaatattttgggaagtttagtgatgattttaatacgtgttttacagctgtgaaagaagcgcttggccaagtagatatgttaattacaacgggcggtgtatcagtaggagattatgattatttaccagctatttacgaaaagttaggtgcatctgttctttttaataaagttgcaatgcgaccaggaagtgttacgactgtagcacaattaaatggcaagttattatttggtttatcaggaaatccatcagcttgttacgtagggtttgaattattcgtaagaccgtgtattcggacgtatatgtttagtgaaaaagtacatttaaaaagagaaaaagcgttattaggagaagattttctaaaaccgaatccatttacaagatttgtacgagcaaaattgcaatatgatgaggggaaattaatcgcttatccatcagggtttgataaatctagctcagtttcttcattggcaaaatccaacgcgtttatcgtattgccgggcgggacaagaggatataaaaaagatatgtttgtcgatgttcttttattagaagataacgaaggtagtgaatggccttggacatttcataaagtgagaggtggttttaatggaacaagtgctatttgagattgtagataatccgattttagttgaagaagtaacgaataaagtcgcaagaagagaagcaggtgcgattacaacatttattggtacggtgagagaattaacaaaaggaaaacgaacgctacatttagagtatgaagcatataaaccgatggcagtaaaacaacttatgagaattggagaagaaatttgtgaaagatggccggatacaaaagtagcaattacgcaccgtgtagggcggctagaaataatggatattgcggtagtcattgcagtttcatcaccgcatcgtaaagtagcttatgaagcgaatgagtacgcgattgaacgtataaaacgaattgttccaatttggaaaaaagaattttgggaagatggaacgatgtggattggagatcaacttgaaaatacaccatatccagaaggaaaaccaaagaaggaagaatgagaaaatgattataattttattgtttgcaaatttgcgtgaggaagttggatcggatcgattagtgatttcagaaaagcaagaaatgacagtgcaacaattaaaagaatggcttaaagccagctattgtttacaatcgttggataaagtgatggtcgctgttaacgaagagtttgtaatgaatgaagagatgataaaagctggagatatagtcgcattaatcccgcctgttagcggtggatgataagttttttcaccagatgaagcgccaagaaaatgttgtatataaattagaataagagaagggatgagttctatgcttactcaagaacaaataatgaatgcattaaaacatgtagaggatccagagttacacaaaagtgttgtagaattaaatatggttagaaatatacaaatgaacggaacaaaggttaaacttgaagtagtactaacaatccaaggttgtccgttaaaagcaaaaattcagcaagatattgaagaatcacttcacgcaattggtgcctctaaagtggaggtaacatttggttctatgacacaagaagaacgtacagctttaacagagaaattaaagaaaaatactagaacagaaactggtatgccgagcatgcttcgcccggattcaggagtacgttttattactgtaacgagtggaaaaggcggagttggaaaatcaacggtgacaattaatcttgcaactgcactagcgcgtatgggcaaaaaagtggggatactagatgcagatatatatggttttagtattccagctatgatggaaacgaataagaaaccaacgatgattgatcaaacggcaattccagtcattagtcacggtgttaaaatcatgtcgatgggattttttacagaaggaaataacccagttatgtggcgcggaccgatgctaaataaatggattcaaaattttcttgcgaatacgcactggggagaattagattatttattacttgatttaccaccaggtacaggagatgttgcgatcgatgttgcagcgatgattccgcaagcgaaagaaataattgttacaactccgcacaatgtagcttcattcgttgcttcaagagtcggtgtaatggcaaaacatacgaagcatgagattttaggtattgtggaaaatatggcttattatgaagaacaagatggatcgaaaaattatctcttcggaaaaggcggcggcgaaatgcttgcagaacaattgcaaacagaagtaattgctcaaataccttttgcgaaacgtgaagaaaataatggttcatctgtatatgatgaagattctcttgttggagaagtgtttacatcgttagctgaggatattatttatagaggatagagggggaagtttagtatggcatgtaacattgatcattctattgaagatgtgatgaataagcttgaaagtcaaaagagttttttatcagaagagatttttaaagggttaaaaaattttttacaaggtaatcactcacaagaaatattaaatgatgtatttcatcttttaaaaaagtatgacttagtaagtgaagaagaaagagagacgagaaataatcaattattgttgattataaaataagtatactttggcttttgttttgtaacaggaggggtaaatggaatggatatgaaaaagatgattgaaatgatagaagcaacaaaagtgactaaagaagaattatcaatttctactttacatcaagagcttgtgaagttatatagtcaaaaaaatgttgctcattataccgagttattaaagtatattttatcattatccgtgcagctcaacctacatcttgtattgaaatattttggcgtgcgaccggttgttgcgacagatgagcgtatgcaatttcaagagatatttaaatgcttagctaagaaagatgagaatggggaatggtttctaaattttgtttctttatatgtagggctaattgtagttcttcgttttgatgagaaagtgattgagagcaatttttttgatgatatggtagtggatgaatgtaatgaaatataggattctgctcataacatttttctatattaaatgctttaactgcgattttagttggttatgtaaatatgaaggtaactaattaagaaaaaggaatgaaactagttggataaaaagagttcttcagttgtttccgtcgttttttcgtgttaccattaagcgaatttttcataaggagagaaagcgatgaaatggatttattttcttattattaacattatagcttttagccttatggggcttgataaacgaaaagcgaagaagaaacagtggagaacgccagaaagtacgttgtttttatcagcggcagttgggggagcagttggaacttggattggcatgtatatgtttcatcataaaactcataaaaagaaatttgttttcggcataccgttacttgttgtaataacggtatgtttattattcgttgtatgagaaatgtcgaaagaaatgcagattgattattggtaaagtgagcatgtgagaccgtataatggagaaaaaatgagaagaggagaaaaaggaagatggggagtcaatcagcagagcaaaaaaaagggatactatatgcggctggtgcttacacgatgtggggaatcctaccgatttattggaaatgggttgaggaagttccagcagatgaaatattagcacaccgcatcgtttgggcgtttgtttttatgttactcgtattaggtgttacgaagaggtttcgccagtttattggggaatttgtgaatctttttaaacgacctaaattattaatgtcattaacaatagcttcagtcttgattagtggaaactggtttgtttacatatgggccgttaatcataatcatgttattgaagcgagtcttggctattatattaatccgcttattagtattttacttggtacagtcgttttaaaggaaaagttaaacttctggcaatatgttgcagttggtttagctggagtgggggttatcattttaacagtacgtttcggggctatcccgtgggtttctttatcacttgccctttcatttggattatacggattaacgaaaaaattgttaaactatgatgcgacaattggacttacgatggaaacgatgttagtaacgccgtttgcgattatttatctagtaatgacaggagtacatggtttcggctcatttggctctatctcaatgttatcgacattactattaataggagcgggtattgttacagctctaccacttttttattttgcaaaaggagcccaacttattccgctttatatggtaggttttttacaatatattgcaccaacaattagcttaattttaggtgtattcgtatttggtgaacatttcacatctactcatatgattgcatttttctgtatatgggttgcattatttgtattctcggtagcgaagactaagtttttagtgcagaaacaaccgaaatttataaaaaataaatcagcaaaagtatcataatgcgtagtattttctacgcatttttctttatactgatactatataggatttccattatagctagtaaggagctgagaacatggaaacaattttacataatgatccgcttatggcagctgtaatttcatggtttttagcacaattaacgaaagtagtctttaaattagttaaaacaggtgaatttgattttgcaaagttttttgcttcaggtgggatgccaagttctcatgcttcaacagttacagcgcttgctacaggagttggagtagtggaaggtgtggaaagctcgatgtttgcggttgctactatttttgccattattgttatgtatgatgcttcaggagtaaggcttgcagtaagtaaacaagcaaaaatattgaatgacttttttcacggtagagaaacagaatataagaagttaaatgaacttgttgggcatacaccgtatgaagtagtagtcggtgctttattaggaattattgtcggagtagggtattgtttatgagcagaacattttatatgttctgcttttctttgtttttatacatattcagctacctttttgaatatcgttatacggatttcgaaagggtgggtgagtaacttgttattatatgaaaaagtgtatgaagaaatagcgagaagaacaactgcacttcaaacaatgcaacggcaagatggtacgtggcggttttgttttgagggagcgccattaacagattgtcatatgatttttttattaaaattattaggtagagataaagagatagaaccgtttgtaaaaagattagcatcactccaaacaaatgaaggaacatggaaattgtatgaagatgaggtgggtggtaatttatctgctacaattcaatcttatgctgccttacttgcatcggaaaaatatacaaaagaagatgcgaatatgaagcgagcggaaatgtttataaatgagcgcggtggggtagcgcgtgctcattttatgacgaagtttttattagcgattcatggagaatatgaatatccttctctctttcatttgccaacaccaattatgtttctgcagaatgattcccctctcagtatatttgaactgagtagctcagcacgtattcatttaattccgatgatgttgtgtttaaataaaagatttcgagtagggaaaaagttattgccaaatttaaatcacattgcaggcgggggcggagaatggtttcgggaggatcggtctccagtttttcaaacgttagtaagtgacgtgaagaaaattataacgtatccactttctttgcatcataaaggatatgaggaagtagaacgttttatgaaagggcgtattgatgaaaatggaacattatatagctacgcaactgcctcgttttatatgatttatgctttacttgcattaggacattctattcaatcaccaattattgagaaggctataatgggaattacatcttatatatggaagatggagagagggagccatttgcaaaactctccgtcaactatatgggatacagctttactcagttatgctttgcaagaagctcaagttccgaaagtaagtaaagtgattcaaaatgcatcagcgtatttactaagaaaacagcaaacgaagaaagtagattggagtgtacatgcaccggatctcttcccaggtggttggggcttttcggatgtgaatacgacgattccagatattgatgatacaactgctgtgttaagagcgttggcgcgaagtagagggaacgaaaatgtagataatgcttggaagcgagcggttaattgggttaaaggattgcaaaataatgatggtggttggggagcttttgaaaaaggggtaacgagccgtatattagcaaatttaccaatcgagaatgcaagtgatatgattacagatccttctacaccagatattacaggaagagtgctagaattttttgggacgtatacgcaaaatgaattgcccgagaaacaaaaacaaagtgcgataaattggttaatgaatgtacaggaagaaaatggatcgtggtatgggaaatggggaatttgttatatatatggtacgtgggcagtgttgactggtttacggtcactaggaataccatctagcgattcatcattgaaacgagccgttttatggcttgaacatatacagcatgaagatggtggctggggagaatcttgccaaagtagtgtggaaaaaagatttgttactttgccatttagtacaccatcccaaacagcatgggcgttagatgccctcatttcttactatgataaagaaacgccagttattcgaaaaggtatttcatatttgctctccaacccttatataaatgaaaaatatcctactggaacaggtttaccaggtgggttttatattcgttatcatagttatgctcatatatatccgttgcttactttggctcattatgcaaaaaaatatagaaaataaaccgagagatgtctctcggtttattttgttgggtagtaggtcccttttgaaaagaataaggttgtgatgtaccttatttttcggttgattggcgcttttgacgtgcatcagcggcatttgcacgtgcgtttgcttctaagtcattgtggtcagcgagttcgcgagagaactcaacatcaatgccatcagttgttttgctttgtttgaaattttttttattcattcgacacaatctccttgcaatttatcccgcataacgggtagtaaaactcccaccttaaaactcagatggaacaaagaagctaggtgggagattaaatgcccgattggtgagggctgataatcagtgggggatgaacaaacttcccactaattaaagtttcactttatgcgacgttgcaaagttagtttgacacaaatagacttttttatacaaagaggagttggaaagtaaaaagccgaaatatacagtataagtaatagaaatgggggataggaatggagtttttaaatgggaaaacagctgttgtaacaggagctgcacagggaattggaaaagagattgcaagggtttatgcaaagctaggggcgaaagtattaattagcgatgtaaatgaagagacgctacaaaaaacgacacgtgagttatcagatgaaggatatgaagtgtgctcatatcgatgtgatgtgagtaatcaaaatgaagcaaagtcgttaattgaatatgcggttcaaaaatttggtacattacatattttggtgaataatgctggaattacaagagacgcaatgttacataaaatggagaaatctgcttgggaacaagtattacaagtgaatttaactggagttttttattgtatgcaaccagcgcttctttatatgagacaacaaggatatggaagaattattaatatttcttctataagtagagaggggaatattggacaggcaaattatgctgcaacgaaagctggagttgtaggattaacgaaaacagcagcgaaagaagttggaagtttcggtattacttgtaatgcgatttgtccggggtttatggatacagatatgaccaaaacgataccagataaagtgaaagaaaagatggttggcgctattccagttggtagaattggaacgccagaagatattgcgaacgcagcagcctttttagcatcagaatacgcatcttatattacaggtgaagtattaaatgtgagcggaggactgcaaatttaaaggaatacataatgaaaagaacctgaccggataggtcaggttcttttcattaatttaagttaagccaaacgctctttacttctgtatagttatttaatgcataagatcccatttcacggccaagaccagattgtttaaatcctccaaatggagatgctgcatcaaaaacgttataacagtttacccacactgtacctgcacgtactttgcttgcaacatagtgtgctgttttaacattttctgtccatacaccagccgctaagccgaattgtgatttatttgcacgttcaattacttcatcaatatcgttaaatggtattgcagaaataactggaccgaaaatttcttcttttgcgatcgtcatttcatcatttacgtcagcgaatactgtaggagaaacgaagtagccttgatcgaatggattacttcctccgcaaagtacttcagcgccttcttcaatccctttttcaatgtagcccattacacgtttttgttgttcttcagaaacgagaggaccaattgttgtttcagggttaagaccgacaccttgatttagttttttagaatagaggacgagatcagccatgacattatcatacattttcttcggaacaaataagcgtgatccagcagagcatacttgtccttggttaaacataacaccagaaagtgcaccaggaatcgcgcgagataaatcagcatccggcaagatgatatttggtgatttaccgcctaactcaagtgtaacgcgttttaatgattcggatgcttgtcgcataatttgtttaccgacaggagtagaaccggtaaatgcaattttatcaacgagtggatgattaacgagagcttgtccagctgattcaccgaatccaggtacgatattaataacacctttcgggaatccagcttcttcaattaattcagctaagtatagagcagatagtggagtttgttctgcaggttttaaaacgattgtacatcctgtagcaagcgctgctcccattttccacattgccataagaagcgggaagttccaaggaataatttgaccaacgacaccaacagcttcatggcgtgtatagttaaagtaatcaccggaaacaggaattgtttgaccaacgattttcgtagcccagccagcgtaatagcgcatatgctcaattgcaagtgggatgtctgctgccattgtttcacggattggctttccgttatctaatgtttcgagctgtgcgagctcttctttatgttcttccattaaatcagctaacttgtacatgagacggcttcgctcagcagtgctcatacgagaccaaggaccttcgtcaaaagccatacgagctgcgactacagctttatgaatatcttcgcgaccagcttcagaaacgacggcaagtgtttcaccagttgctgggttaggtgttttaaatgttttaccggaagcgctttcaatgaaagatccattcacatataacttttttgtaccttgaagaaacttctctaccttttcatgaagatttacagctagttgactcattgtataacccccttgaaaatataatgtaaacgcagtacgagacggcgcttattccgaaatcaaggatgtggaaactagatggaaagcctctaattaaaatcataattaagaaatactgaaaattcaaatttcattcgtgttacaattgtaaaaaatatgtaatgtaagagaatcttctatatgattataaaaaaatcctgcttgtttttgctttctagtaggaaaaactagaagaacaatggtacaataatacatcgtgagaggaggggtaaaaatgaaagattatcatgatgatccacgctttcgaatagcccatagagaagcgttaattggtcttggacttgctattattaattttataatttggtacggatttgcttatgggcttggtagtaaaaatccgaatgaatatacatatgtattaggttttcccgcatggtttttttatagctgtatcgttggatttatcgttatggttattttacttagtttagttgttcgttttgtatttcaagatatttcactcgatgaggaagaaaaaagtgaggaataatagatgaattggtatgtaatcattccaatgataatttcgtttatcgttgtatttttaattggtgtatatgcttcaagacgcgtgcaagcaactgctcataataaatttttgcaagaatattttcttggtgggcgtgagctaggcggtttattattagcgatgacaatgattgctacgtacggtagtgcaagtagctttattggtggccctggtattgcttacaatatgggtcttggatgggtactgttatctgcgattcaagttgtaacagggtatatcgttttaacggttatcggtaaaaagtttgcaattatcgctaggaagatggaagcaattactcttatcgattatttaaaagggagatacaataataaagcagttgttatactttctgcgttatgtattattatctttttattttcagcgacagtagcccagtgggtcggtggtggacgattaatcgagtcactaacggggctatcgtatacaacagcactatttttatttactttttctgtacttgtgtacgtattaattggtggatttcgtgcagttgctctatcagatacattattaggaatcattatgttagttggaacaacaatcattttaattgctactgtcattgctggtggtggaattgaaaagattatgcaggaacttgttcaaattaatccaaagttaattacaccattcggagcagatggcagtttaacgaaatcatatgttacatcattttggattttaattggaattggcgttgtcggtttaccgcaaattagcgtgcgtgccatgtcttataaaaattcaaaagcgatgcaccaagctttaataattggaaccgttgtcgttggcacaattatgatcggtatgcatttaacaggtgtatttgcaagagtagtacttccaggtataacggtaccagataaagtaatgccgctacttgcgatggaagtgttgccaccttggttagctggagttttcttagctgcaccgatggcagcgattatgtctacagtaaactctttattattacttgtaagctcgtcaattattaaagatatatacgtaaattacataaataaagatgcagcagacagtacgataaaaaaaggaagtttgtggattacgggtattgtaggactactcgtttatgcagcggcaattaaaccaccagattttttaatatggctaaatttattttctttcggtggattagaagcagcattcatttggccaatcgtattagggttatattggaggaaaggaaatgctacaggagcgcttgcgtctattttagttggggtaggctcatatatgtgtattcatcttttctatccaaatccgttcggtatacatacagttgtcttcccgatttgttttgcgtttatcgcttacatcattggaagtatgagtgctgtaaaaaaaacagtataggttagctgaagaaacgtagtccttataagactgcgtttttttgtgtgaatttgttcattttttattctgtatatccacggttattcataaattaataacaactgaggggatggagttgaggtcgatgaaaaaagtattatttttaggagacccaggcattgatgactctttagcaattatgtatggattgttgcatcctgatattgatattgttggtgtagtaacgggatatggaaatgtaacacaagaaaaggcgacaagtaatgccgcatatttattgcaaatggcaggacgggaagatatacctgttattaatggtgcgaaaattcctttatccggagatattacgacgtattatccagaaattcatgggacagacggtttagggccaattaaacctccaaaaactttttcaccaaatataaagcctttttgtacattttttgatcttcttgaaaaatataaaggagaattaataatagtcgatgctggtagatcaacaacattagcgacagcatttattttagaaaagccgatgatgaagtatgtgaaagaatattatataatgggcggtgctttcttaatgcctggcaatgtaacaccagtcgcagaggcgaattttcatggtgatcccattgcgtcacaattagttatgcaaaatgccaaaaatgtaacattagtgccacttaacgttacatctgaagcaattattacaccggaaatggtaaaatatattacgaaacactctaaaacgagttttaataagttaatcgagccgatatttacgtactattataaagcttatagaaagttaaatccgaaaataaaaggaagtccagtacatgacgtcgttacaatgatggttgcggcaaatccatcccttttagattatgtatatcgtcgtgtcgatgtagatacagttggaattgcaaaaggagagagtattgctgattttcggcctcaacctgatgcaaaagcattaaaaaattgggtgcgaattggttggtcgttacattataaaaagtttcttgaggattttgtgaaatttatgacgtagacataataggagcatacaagttaaaataatggagatggttatttaaatgaccatctccattattttgtttttaaatgataaatagagaagagttacacaataggagaggaattttacttgaaaaaaactatagtatgcgcagtaattgtgggtatttttgttttgctaatatcgggtaactttttagtgaaaaaagtgtggagttcaaataatgatgatgcacagtatattgcatcttttattgaagaacataaagatgaaaaaaatagtgcgcttctagtaaagagaaatgataaagttgtttattctgtaaacccaaatgttgtattgccagttgctagtacgatgaaattaattgtggcgcttgaatatacgaaacaagttactgaagggaaaattgattcttctagtttcgtgtcgattaatgatgtgaatcgttattatgtgccgaatacagatggtggtgcacaagatagatggcaaaagtatttggagaagacgggcaagataactgaaggagcggtttctttagaagaagtggcaaaaggaatggttaagtttagttcgaatgcaaatgctgaatacttaatggaattgttaggattagataacatcaatcgaaatttacaaagtttatcacttcctgcacatcaaccactatttccaatcgtttcatctttgtatatcccgggatatttgcataaagaattacatgttccaaaatataaaatagagaaaaagttaaaagaaatgtctcaagagcaatatcgtgaatatgcgatgattattcatgaacgcttaaagaagaagggaccattattacagaaggaaattccgctttatttagaggaacgttacgacaaaatttggtcagatagattaccagcagcttctgcaaatgattatatggtattacttcaaaaggcaaaccataaaggtggcttgacagaggctgaagaaaaagtgtgggcaaatatcgttgaaacagacatgagtgccaagaaataccgtaaaacattcagacatgcggggcaaaagaatggttacacaccatggacggttacaaaagcagtttatgctatggataaacgtggaaactgtacagaaattgtgtttttggcgaataatttaaatgaagacgatagtgcagaaatacggaaacatttagcaaacttgcatttccaagtgttgcaaagtgataagtatgatgcgacttttattaaataaactcggtgcagagagcaccgagtttatttttatgtacaagcactttttttctatctctgggtatgatgggtagtaatacttaggtgagaggggaaaaggtgatgaaacaaagtaaagaagagtttataaagagtgaaggcgctgatttccctgggaaaacatatgtggattgtgtattacaacatgtatttgattttcaacgaaattacttattgaaagatatgtttcaagtgcataaagcacatattacgatgctgacggaagaaaatttaatgaaaaaggaagaagctaaagttatattacacgcattaaaaaaggtagagggaattccagaagagcaattgctctatacagagcagcatgaagatctcttttttttagtcgaacatttaatttctcaagaagcgaaatgcgattttgtaagtaatatgcatattggtagaagtagaaatgatatgggcgtaacgatgtatcgcatgagtttaaggcgatatgtattacgattaatagaacatcatttgttattgcaagaaagtgtactgcaacttgctgctgatcataaggaaacgatcatgccagcttatacacatacacaaccagcacagccaacaacatttggtcattatacgttagcaatttatgatacgatgcaaagagatttagaacgaatgaaaaaaacgtaccagcttttaaatcagtctccaatgggggcggctgcactctctacaacaagtttcccgattaaacgagaacgagttgctcatctacttggatttacaaatgtaattgagaactcatatgatgctgttgctggagcggattatttattagaagttagctcgctacttatggtaatgatgacgaatacgagtagatggattcatgactttttgttgttagcaacgaaagaatatgacggtattactgttgcaaagtcatatgtacaaatcagtagtattatgccgcaaaaacgaaacccggtttcaattgaacatgctcgtgcaattacgagtagtgctttaggagaagcatttacagtatttcaaatgattcataatacaccatttggtgatattgtcgatacggaagatgacttgcagccatatttatataaagggattgaaaaggcaattcgtgttttttgtatgatgaatgcagtgatccgaacgatgaaagtagaagaagaaacgttaaaaagtcgttcctataaacatgcaataacgataacggatttcgccgatgttttaacaaaaaactatgaaattccatttcggcatgctcatcatgcagcaagtgctattgcaaatatgtcattggagcagaaaaaagaactacatgaattacacttcaaagaggtaaatatgtacttgcaagaacattttaaaataaatttattagaaaaagagtggaaagaaattatatcgccagaagcttttattcaaaaaagaaatgtatacggtggaccgagtaaaaaagagatggagcgcatgatcaaaaatcgaaaagagtcatttcaaaaagaagaagatgtatttgaaaaggaaaaacagagaattttacaagctgaaaatgctttgaatacattagctttgaatattattgaatcgtaaaagagggatttgatgaattaatcgccaatacttaattaaactatgaatagagagaagagattgtcgatgattcaattacatgtatatgaagagatttttcattttaaagaagatgttacaccatttctagaaaagaatgagcaggaaaacaatctcatattaggtgtattacaaatggtccaagaaccgatatttatggggatagcgaaacaaggagaagaaattgcggttgtatttctgcaaacagaagagaagaaacaaatcattgttgcaacttctgaaattgcgggagtaactattgaggaacttgcaaaagaattaacgaaagtatatccggatattcctggattgatcggtaataagaaaattgtacagaaattagcggaagagattgccgtattagaaaataaaaaaacgaatgttgcaatggagcaaggtgtgtatgagctgaacagagtaaagaagaagtgtaatgcgaatggacttttccgagcggtaaataatgatgaattaccattaatagaacagtggatatatcaattttgtgaagacgtaaagcttcctactacgaaagaagaagcaaaacaaactgcgtatacattaataactacaaatcgactgtttggtttggaagtggatgggaaactcgtttctgtagctgcaaaaacgagaccaactaaaaataatataacagtcaatttcgtatatacgccgaaagaagcaaggaaaaaagggtatgcatctcattgtgtagcagcacttagtcaacgtatgttagatgaaggctaccagacgactacgttatatactgatctagcgaatccgacatctaataaaatttatcaagaaattggttatgaacaaattgcggaatctgtgctcatatttttagagaagtaaaacaaaaaggcgtgctattttagcacgcctttttgttattcatcaattctaataacctcgccttgagggaattcctcagtttctagtaagttacgaatagctttcgcaacatattcaggtgataatagctttccttcttcttttaatgcaatgaagcggtctaaatttgtgaagtcttctttagctgtttcacgaatttgtgcttgcatatttgtatcaacaacaccgggggcaaaagcgacgatttttactggatattctttttcccattcttcagttgctacgcattgtgtaaacatatttacaccagctttcgtcgtacaataagcgccccatccgaaataaggattttttcctgcaccagatgaaatatttataacgcgtttatctactttccattctttcgtatgtttcataaacgtagatgtaagaatcataggtgcaagtaaattaatgtgaacgttcgtaatgaattgttcactttctgctttttcaatcggcttcataggtgcaactgtacctgcattattaattaaatgaatagaggatacattgtcttctttaatggatgaaatgatttctttaaagttagtttctaagttatgtacatcttgaagatctaaggaatgaaaaatgcaattgctgttatattgctctgcaagtttagtaagttctttattttctcttctagaaatagagatgacagttgtactttcttctaacaactgagtggcaatagcctcacctaaaccttgtgaagttcctgttatgataacgtagcgcatagttttataaactcctctcgtatgtgcggaattttgttggacaacgtacattgcatagtttgtctacattttatagtatagagcactttttactataaatgaaatgagatgattgtgtgccttttataaaccgttttacaacaacagtacctggtgccgtcacgttcactgggaacacgttagggcttagccctacatcacctgcgccaggtaatatttttggtacacttgctgtatttactacggtaaatacagcgctgcaagtaccagggttcccagcaggaacgacggatgaatggcaattgaattcttcaagtgcaattttaaatcttccggcggggagtagtgtactatatgcagagttagtttgggctggtacttttcggactgatacggaagatgttttaccatttttaaatgatgatattacatttacaacaccatcagggacgtttgctgttacgccagatcccgctaccgcgcagcaaggttcagtaggaaatcagttttattatgctcgctctgctaatgtaaccaatcttgttagtgcaggtggggcaggcacatatacaacaggtgctgtgcccgctgcaagaacttcagctgatccaacaatcagtcgttcagctggctggacgcttgaggttgtatatcaaaatgcaagtttacctcttcggaatttgtcagtttatgcaggccaagaaattattgatgcttcatccccgcctgttgatgctactatttcaggatttgctactccagctacaggagctgttacaggaagagtactcgtaactgttcaagagggagattccaacatttctggagatcaacttcgctttggaccaaacccaaatgctacagttgcattattcggaccgagaaatccggcaaataatttctttcaatctcaaatttgtaatgactttggggaattagatacaaccggaacgtttggagatttgaatcagccattagggatagctttggctgttcgaagacaaggatgggatattacaaacgtagatgcttcatcatcattagtaaataatcaaacgtcagcaaccgttcggttcgttacaaatggtgatggttatgcagcggctggttttggtgttcaaattgatgcgacgggaccgattataaatcctgtcaaatctgttgataaagcagttgcaggtataggagatattctcacttatacgattacagttccgaatacaggaacaggaagtgcggacaacgttttattacaagatagtattccgaacggcacagcatttatagctggtagtgtaacggttggtggagtaacacaaccaagtgcgaatccagctagtggaattaatttaggaacgataccaaataatgctcaaagaatcgttacattccaagtaagaattacatcgtttccaaatccaaaccctatttcaaatcgtgcaatggtgtcttaccaatttcgtcctttcgttggtagccttcctattgcaagtacgtcttcttcaaatacagtacaaacgacagtgaatcaagcaactataagtatgcaaaagtctgtagatctacagacggcaacacttaatgatgtattaacgtacacggttaatgtaacgaataatggaaacatcactgcaaacaatgttatttttgttgatagtatccctgctggaacaacatttgtcgcaaatagcgttacggtaaacggggtagcacgtccaggagcgaatccagcaagtagtattaatcttggaagtattaatgcatcgcaaacgactgtagtgcgctttcaagttcgagtgacatcaaaccctcttgtcaatccaattccaaaccgtgcgagtgtaacatttaactttactccagtacctggtcaaccaccagtttcagggcaagcgacaagcaatactgtagttacgacaattaatatagctgatataacaacgagaaaaacagtggataaagcttttgcaacggttaacgacgttcttacgtacacggtaacaattcaaaatacaggaaatgtacttgcgacgaatgttatttttcaagatccaatcccaactggaacgacttttatcacaaatagtgtaactgtagatggaatttcgcaacctggggcaaatccggcaactggctttacagttgctaacatatctccaggtgggactaggacagttacatttcaagtacgagtaacttctacgccatcaggaggtacgattccgaatcgcggaaatgtgtctgctaatttcgtcgttattccgaatcagccgccaataacgattaatagacaaacgaatacagttgtgacacaagttaatacaggcagtttaaatgtaataaaagaagtgaatacaacacaagcagcagtaggagatactttaacatatacgattgccgttcaaaatacaggaaacgttccgctaacaaatgtgttatttcaagacactatttcttccgctgtttccttcgttgcaaattctgtaacaattaatggagtacagcaaagtggactaaatccgaatacaggattctctcttccaaatattcctgcggctcaaacggttgtagtcacatttgacgtagtaattgtacagaatccagaaaatgaagatattttaaatcaagcaaatgtaacagcaagctttcaagtgaatccgaatgaaccaccagtaacaatcaatgtaccgagtaatgttgtgaatacgacagtacaatcagggaactttgaagttgtgaaagcagtgaatacgaatgtggcaacggtaggagatgttttagtatatacaatcgaagttataaatgcaggtagtgtaccagctacaagtgtatttttccaagattcaattccgccagggacattatttattgaaaatagtgtattggttaatggtgttttacaagagggggcagatccaggactaggattcccattaaatgatttacctactggcgcgagtgtaattatttcatttgaagtattaattgatgaaattccgccagggaataatgttgtaaataacgcgaatgtaactggagattttcttgtaaatccaacagagccaccaattactgtgacggttccaagtaatactgttatgacagttgtgaattcctcaggactaaatgtaatgaagagtgtaagcgctactgaagcaggtgtaggagatacactaacatatacagttgctatacaaaatagtggaacggtagtagcgacaaatgtatcattccttgatccgattccagttggaaccacttttgtagcgaatagtgtaacaataaacgggacacctcaaccaggtttaaacccgacaactggatttccacttgctaatattccagtaggaggtatagtaacagttactttccaagtggcaatcacgagtgtaccaccaaatagagttcttccgaataatgcgaatgtaactgctgatttccaagtaagtcctctccagccaccaattacaattgtaacgattagtaatattgttgtgacgcgggtgaatgtaggatcaattaatgtaataaaaagtgtaaatacaccacaagcaggtgtaggagatacgttaacgtatacgattcttattcaaaatacaggaactgtccccgcaacgaatattatttttcaagatccaatcccatctggagctacatttgtagcgaatagtgtaacgattaatggagtcgttcagcaaggtgcgaatcctatagtgggttttcctgttacaaatattccagttgggcaaactgctacaattacgttccaagtgacagtgacaagcgttccgagtggtggaaatataagaaatcaatcgaatgttactgcaagtttccttataaatccggcaggacctcctataacgactactacaaatagtaattttgtagtaacacaagtaaatacagcgagactaactatacaaaaatcttcatctgtacaacaagcagcacttggagagacttacacatattctgttgttatacgaaatacaggtacagttgcagctacaaatatttctttcattgacacgattgctccagaaacaacatttgtagcaaatagtgtaacgataaatggaacgcctcaacctggatttgatccaaatattggtttcccgcttcctaatattgcagctggcacatcattgacagtaacattccaagtgatagttgttgcaccatcaacgcttggggcagttctaaacacagcgtctgctacagctactttcttattgaatcctttacaaccacctgtaacaacaacgaactcaagtaatacaacggtagttacaataccgttacctcctcctggtgaagtgacagcaataaaaacagtaaatattgcaactggggctgttggggatgtattaacgtatacagtgctaataacgaatgtaggaattatccctgttacagatgtactcttccaagatgtcattccagaagggacgacgtttgttgacaacagtgtaacgataggtggagtgcagcaacctggattaaatccagaaataggctttacagttagtccgttattaaatgctggtgcgagtatttctgtaacgttccaagtgaccattacggaaattcctgataatgaagtcatattaaatgatgctgacgttacatttacttcacaaccgaatccgcaggagccaccgattacgcaaacgatattaacgaatttagtcgttacgacaattaatatagcttcaatttttccagtaaaaatagtagataaaggggcagcgacggttggggaaatattaacctacgatgtactaatttttaactttggaacggtaccggcaacgaatgtccaatttcttgattctagtacgagtggtgtagcgtttgttccaggaagtgtgagtataaacggagtgccagaaccaggattagatccgttcataggctttacagttccagatatacctgtaggtgattttgtacttgtcacataccaagagatggtaacgagcatacctcaaggtggaacagttgttaactttgtggacgttacggctacgtttgctgtaagtgaaacagagcctcctattactgaaacgacgacaagtaacacgacattaacagaaataaatgaatctggttggaatgttttaaaatcagtaagtcagccggttgttgcagtaggcgatacaatcacatatacaacagtagttcaaaatacgggaacagtgatagcgacgaatgttcaatatagtgatgtattaccatcctctataacattcgtaccgaatagtgtaacgataaacggtgtgttacagcctggattagatcccaacactggcttctcacttccggatataactccaggtgaaagtgtagaagtcacattccaagtaacagttgttagcgttccgtcaaacggaacaattgccaatacggcaaatgttaccggaagctttattttagtaccaggagaaccaccagttatagtaaatcagccaagtaatacaacactcacaactgtaaatagaggacgctttaatgttattaaacaagtaaatagagccgctactctagttggagatgtattgacgtatacagtgcaaataacgaatacaggaacagtaacagctaacaatgttcagtttattgatacgatttcaacaggtgcgtcatttgtaccaaatagtgtaacgataaatggagccccgcaaccaaacttaaatccgattactggatttggagttggagatatcccagttggtgaaacagttatagtgacgtttcaagcgacagttacaaacatcccgtcatcaggaacaattacgaacgttgcaaatataacaggaagctttactttagtgccaggagagccaccggttgtagtaacagagccgagtaatacgacgataactagagtgaatagaggacgattcagcgttataaaatctgtaaataaagaagcgacacgattaggagatacgttaacgtatagtgtgcaagttacaaatacgggaacggtaacagcgacgaacgttcagtttagcgatgttccatcacctagtttagaattcgttcctggaagtgtacaaataaatgggattccgcaagtaggtttagatccatttgtaggctttgcattgcctaatcttgcagtaggggatagcgtattaattacatttgaagtaaatgtaatcgcagttccgccttctaatagcattatgaatacagcaagagtaacgggtgattttgaattaattccaggagaacctccgtttacaattacgaattcaagtaatacgacagtcacaccagtaaatagaggcagtttagatatgcaaaaagaagtagatcattcaattgttggagtaggagaaacagtaaagtatacggttcgaatattaaatactggtactgctgatgcgatgaatattcaatttatcgatgtcctatctccggaagctgtttttgtaccaaatagtgtaactgtaaatggagtagctcgtccgggagtaaatccgcaggttggatttacgattgtagacattccagtcggtgagacggcgattgtaacatatgaagctacgattacgagctttccagatggtggtacagtagtgaacgttgctggggcgttagcagaatatattttagtaccaggggagccgccagttacagtgatggatacgagcaatacagttatagtgacggtaaatactgcaatcttatttgttgcaaaaggagcaaactttgaagtagcgatggtaggagatgttgtcacttatggaattgccgttataaatgacagtacagttcctgtgacgaatattgttttaacagatatcattgatccgaatactttatttataaatggcacggtaacggtaaatgatgtacctcttccatttgctaatccgaataccggtattccgttaggtgattttcagccaaatgacgcagcaattattaatttccaagttgtaataacaggaggacaaataaataatttagttacaaatactgctatagcaaatgggctcgcaactgtaaatccgaatgagccgccagtagtagttgaaggtgatagcaatacagttgttatcccgtttattcctcaaaatgtctcaacgacagtcgtaaaaacggcaaatttacaggcagcaacaattggcgatgttattacgtttacgacagttattacaaatacgggggatacagcaatacaaaatattcgttttcaagatatgttagatagtagtgttcaatttgtccttggaactgtaacgattgataatacgccagtgccaaatgtaaacccagtatcaggttttattataggaaatttaaatccaggtgaagcacggacagtttcgttccaagtagtagtgcagagcgcgccaaatggttcaggaaattatataaatcaagcgagtattcgtttcgaacatcaagtaggcacagtattgccacctgttacacaaatggtagaaagtaacatagttgtcattccatttgttccaacgatagaacaaatttgtgaaacaaatcttaattgcttagggaaaattccttttcaatgttctccgtgtaatcatttgcaaataaataaaaaataaatacagaaagagcatccggaaaaaaggatgctctttctgtatttatcatgtagattctttttcgggtgaggtgaaaaattcgtcgattttgtcggagagtagtaatggaatggcttcttttataacagaaatgtcccagtcccaccatgcgagattctctagtttgtcaatcgtttcttgggggaaacgatatcgaacaaattttgcaggattaccagctacaattgcatacgggggtacatcttttgtaacaatgctcctggcgccgataatggccccgttaccaattgtaacaccagataaaatgcaggattgataaccaatccatacatcattgccgactacgatatcaccttttgaagaagggtgaccagtaatatgtgctccttcatcaaaaagtgcattaaatggataagttgttatccagtctgcgcgatgttcaccgccaagtatgaaaacgatttcttctgctaatgaacaaaacttacctatttttaattttgtttcatcgttccaagaaaaaatggttggccctactttactataagtataatcaccaatatcatatttattatattcaggtttttgatttaaatataacatgcttcttcagcctcctttctcaattaagtgatacgtatggaatattatatgcaagatgtagtaatgtgaactgtattaataggtgaaatgaacaaaagggagtgggatgtatgcgatacgaaatgggtttatataataaaccgtttcagtcaattcaatcaggaaaaaaagtatatgaagtacgcctatacgatgaaaaacgtcaactaataaacaaaggcgatgaaatcgtatttacgaatcttacgacaaaagaaatgatgacggtaaaagtaacggaaataaagcgatacgagagctttaaagccatgtatgaacaaatcgataaaaaattattggattgtgaaaatgatagtttagaggaaatgttagaaagtacatacaaaatatatacgaaagaacaagaaaaagagtggggaacagttgcgatttgtattgaggtaataaaatgataagaaatcgcggagcggctatcattgtacaggaaggaaaaatcgctcttataaaacgtattcgagaagaggaaacatattatgtgtttccgggcggagggattgaggaaggtgaaacgcctgaagaggcaacgaaaagagaggtatacgaagaattaggggtacatataaaagtggagcaccttattgcacaggtaaaatataaagggaatgaatattattatgctgcctatattacaggcggagtgttcggaagtggaacagctgaggaatttcagtgggaaggtagaggaagttatattccgttatggctaccgataaatgagttggaaaaagtgaatataaaaccttatgaagtggtcggaaatatatttaatcattataaaatataacgtctgacaacatacaaaaaaaccattgacataggcttctgatttaagtattgtattcgagtatgtttataatcaggaggtttatatgagcaatcaaactactacacatcatgtgaaaatgacaacagcagatccatctggaattggtctatttggattagcgatggtaacacttgtagcatcatctcaaaagttaggcttaacagatggcgtttcacttgtattaccgtgggcaatctttttaggaggatttgcacaaatctttgcttgcattcatgatgcaaagcataacaatacattcggtacaacagcattcggtgcgtacggtctattttggctaggtgttggaatgacttggttaattcaacttggagtatttggcgaaaaattagcacaagctgcagattcaaaacagcttggtgtagcctttatcggatatttgattttcacaatctttatgacaattggtgcaatggaaacacataaagtattatttatgattttcgtccttattgatttcttatttatcggtctttcattaagtactttaggtgttatgccgcatgcaatgcataatttagcagcatattctgaacttcttatttcattattatctttctatggttcagcagcagcagtgttaaacacacacttcggaaaagttgttttaccagttggaaagccgtttggtatttttaaaaagtaataaaaaagcacagatgattgtatagtcatctgtgcttttttatttattgaaagctatagcagtcgtccttgttaattcagaaattttttgagagctcgcagaattaccgtctattgttacatgaacttgttgcttagggttcgctgtaactacccatgcgtttggtaaatagcgtgatttatgagataaggtggaagggatatttaaaatatctcccattgcatataatgttgctgatgatccaccgtccattgccatcgcattgacagcacctttttcataaagaatatcttgacaatctctcaaggaagcaccaatgctatgaggttgtctaccatcaatgacgaaaaacataatcgatccatcttttttctgagccataatgcttcgagggccatatccccaaccaccatcatttgtaatcattttttctccatttacaattagctgaggcataaatccagcagcggaaacaacatttttatttaacaattggttagcagaaaactctccagaaaccatttgtccatattttgtaataccactagtgagggtaggggtattaatatctttcggcgtgtttataactttaccgttttcaataacaataccgattccggttttaccaccaccatgcccggtttcatcccaaaaaccactggcattgacagcggcaactgcatggtttcgctttgccattacgtatattttttctccgacgtctttaccttctgaaccttgctgggtaacaagttttacgttgaatggattactaattgtcattaatttcccttcgaaaaaatgatcattatattttttctttattgtttcaatagaaacatctagtggtaaatcttttcgtctttctaactctttttttgaaagtttagaagttaaaaattcactatttttccattttggatttgtgatggattgagaaatatcatttaattcttcatcagacaataacgtgaattttgcatattgtggatgctgagaagttaaaatactctcggctgcgataacacgtaaattatgaccgtatgaagtaccgaataaaataatagcagctcctattagtaagaatattgttaaaagggaggttgcttttaaaaatctaataaaatactttctcatcataaggactcctctttctgtaaagtgaacaattgattagagattgagcatgatacaaaaacattttttatttgaaataagtaatgtgaaatgatgataatacaataatgtttgaagatagatttggcaatagttgaatatgaatgtagatatttaaaatgaaatataaatagtcagatgtgaaatgtaaataaaagtagaaaaaaatcaattgaaattgattctcattattaatataatgagaatgagaatcatttattgttagagggggatgccaaagtggcaaaaattttaatagcttatgcaagtatgtcaggaaatacagagagtattgctgatttaattaaagttagtttagatgcttttgatcatgaagtagtattgcaagaaatggaaggcatggatgctgaagaattattagcttatgatggaatcattttaggatcttatacgtggggcgatggtgaattaccatttgaagcggaagattttcatgatgacttagaaaatatagatttagctgggaaaaaggtagcggtgttcggatcgggtgatacagcgtatgaactgttttgtgaagcggtaacgatatttgaagaacgtcttgtagagcgcggtgcagagcttgtacaagaagggctaaaaattgaattagctccagaagatgaagaggatgttgaaaaatgcagtaattttgcaattgtatttgctgagaagttctaagaatgggagtgtcaacgtggagacaatgttaagtgtaactgctattacaaagttaagagatggaaaactgttgttagctactacatataatggcttatttgttgaacaagacggagaatggaaacgaattttaaatggttttcaaaaacgaattagggatttacatagcgaagataatgtagtttatggtgtaggtgacgaagggatttttattcgtagtatgaatggtggagagaactggacaattcagcgttttccaacaaaagcaacgagttggaatgtatgtagcaatgtacaaggaaatgttgttgctcatggagaaaaaacgctgtatctttctaataatttcggttcgacatgggaaactattcatccgtttcttgagtatggcagtgcggcaccgtctattcgatcgttatttttatataaacattacttatttattggtacgaaaatacatgctaaatatggtggtgtttggctctttgatttgaagacacgtaaattaaagaggattaaaattgcgatgaatcaaatgatctccgcgttgactttacacaattcttatttagtagcggcaagtggatcgtgcaagggagttagcgggaatatttcttattgtaaaatagatgaaagtattgcaagtgaaaaaatatattggcacacatgtcaaagtgagcagaaagcaagtagttatttagacttaagtgtagatcaacatgttttatatacaacttcaacgcaaaataaggcgggtattagtggtgtgtgccgtgtgcttcttgaagaaggtattgttacagtatgtgattcagttaaagggcacggatggcgcattgttaatcaaaaagagggttatgtagtagccggatcaggtgaattaaaagcaatgcagtgggaacaaaaaataatttaagaaaaaactttacttttattatattgatatgatatagtatgtttaaaccattttacttttaataatatagagatttaaatgagctgtaacttccgaggaggatagcaatgttaaatctcctcaggggttgcagttttttaatatctggcttattattgtaaggtggttgaaaatgaatatgtacatataggtacattgtaggaggatttttttcatgcaaaacggtaaagtaaaatggtttaactcagaaaaaggtttcggtttcatcgaagttgaaggcggagaagacgtattcgttcatttctcagctatccaaggcgaaggcttcaaaactttagaagaaggtcaagaagttactttcgaagtagaacaaggtaaccgtggacctcaagctactaacgtaaacaagaagtaatttttgaaaaaagaagggctcgcccttctttttttttgcacttttatagatgtcctcctacttacatatcataacaagactgaattttcatttatttattcggagtatttttgtataaagtacatgaataaataaatactgaaaataaagtgtttgtgtgaaaagcaatttagaaagaggtaaataaattgaaaaacgctacacatttcattgtgtttgatattgaaaggaatttcagaccgtataaatcagaagatccatcagaaatagttgatatcggagctgtaaaaatagaaataggtacaatgaagataattgaagaattttcggagttagtaaaaccaagtgcacgattaactcgtcatacaacaaaattaaccggtattacgaaaaaagatttaatgggtgtagaaaaattccctcaaattatagagaaatttattcagttcatcggcgaaggttctatatttgtttcatggggaaaagaagattatcgctttctatctcatgattgtacattatatggtgttgaatgcccaagtatagaaaaagaaaatagaattgatttgcaaaaatttgttttccaagcatatgaggaattgtttgaacatacgccaagtttacaatttgcggtagaacagctcgctttaacgtgggaaggaaaacagcaccgtgctttagcagatgctgaaaatacagcaaatatacttcttaaagtgtatagcgagagagatattaataagcgatacaaaagacatggtgaacttgaacttgtaaaaaacggaaaaataacagaaaaagcgaaaaaaaagatgcgaaaatgggtgtttaaagaactaaagaaaaatacagaacgcccttttgaatggagtacatttgaaagtggtgacacgtgggaaagtataacggaaagatattatataagtgaaaatacagtagaactcctgaaaaaacattttcgtacagcagtgagaaaagcggaacgacagattaggtatttggctgagatggaggagaatacagaggttaaatgaattgctcctccatctctaactacatacatgtaataacagcgtattgatattaaataggcatcaacttgttgttgtgattgtacattataattgctttgggagtgttaagacgtaataagagttttaaactgtattaataaaataaaaatatatataaagaaaagagtgtagtttaatggaaacaatctttaacattttaactgttttagtttttgggataatatttaccacacaattagcattaactacactttctttcatagtaaagaagaattggaaaaaacttaatatctctttaagttgtggtgtattaaagtttaaaatagaagagtaagattgagttttgtacaagggaggtatgatagtggtagacttggatattaaagatgtcacagtaaagatggaattaaacggtgtcttttggaatgaggatcggattgctgaaatgaaggtgactacaaaagaagagcattccgttattcttcgtctagtagttgatttagaaagtaaaactattagggcgacgagtgcggaaatagtgaatggattctgccctctgtgcaaacagaaaagggacgaatgtagtgaacttaatgacttgcaaaacaaaatggaaattttagaagaagcctacgattgggtgagagaacatccggaatatcgttttcaattatctttttacgagtacaataaatttgaggtagtaaagtgaaatttgcattttaacaacttatagaaggacttggtcaactagaaatattgaagtagatatttctaatggaaataagcctgtataacaaggaagggatatatttgattctgcaacaaatgtcatcttgcatcaaaaaaatttaaaaataaacatgttttattataaagcagaaaaatcgattcttagtagaatcggtttttaatataaataaaagagcgcttattaaaagcgcccagtaacaacagttatatggaagtatttatcccgtaaaagcccgattggtgagggctaataattagtgggggatgaacaaaaccccacagattaaagtttcactttattcaataccgctcggatcaaacgaatactgctgcttattctcaatccgctcaatcacatcttgcagctcatctggcttcagaaactcaataggagagaagcctttttcaaatgtaagtgtgtctgcttcaatcataagtacatatcgatcatttaccttcgcaatatgtatttgatccccaaaatccgcaagcaacgccttcacagagatatgatcggcttttagttttaattccacttcaggagcatgctcgacgatttgagcggttgcttccattacttcttcagttgaaaattgttccataatttcgcgtttcggactggcagcccatacttccatcgcttggtcgaattgttcgcgttcttccgtaccttcttcaaatacatcttcaatttggtcgtataccatgtccattacttgtgttttcataatttcaggcatagagcgttcatattcgacgaattttaagaagtcttcaaagtagcgggcatgtgatgcttgatgtatttttagttcgcctacttcaaccattccttcttcaggcatgtacggatattggatagatttcatattctttgttgtgatggccatttcaacgttacgaatcagtgttgattcatcagaaatagaagcaacctttggttcaaagtcgcatttcattacgaatacgaatggatcatcaaagtatttgcgtagttttgcctgagcaattaaaaatacaccaccacgtacagcgcttgtgtcaagatatgtataaacgagaggttcgctcatatctttaaagttttcttttgtttctgcaaagcgaatacgattaaaaaggttgtaatgagggtttgaatcaagttcgtgcccttcttctacaataaagcgaccaatttttgttggggcttgttctgtttttgcatgacgttctacttttcgcttcgatatttttaataactcaccattcaaaaattcttttaaggaactatcttcatattcttcagcgtctaaagtttgaaaatgtttgtagcgtttatcaactgcttcaccttttccttctacttgtacaacataaaaggaaagataatttatttcaaaatccatatttatcaccttgtttcatttcattaactcttatcagtatagagatggaaaaaactttcgtcaatttatataaggaaggggaagccccttcctttatataatctttattttctcgattaaaatccgtcttctaatgctgcgaatggaatgtttagtctgttttctactgtgcgtaaacgttggtttaagcggtttagtctacgtgtatggcgctcaactgtattttctagttgacgaactctttgttcaagctcatttacgcgtctttctaattgacgatttccagtgccaggaaaagagattggaagttggaattgtctattttggtcatatggattcgtgtgctctgcttgatctatataagattgatattgtgtttgtaagtcatactgtggttgttggtacgcatattgattatatggatcatatggattgtagggatacataataacatcctccatttctttaaaataggttgaattcaccataatgtatgtgtaaaagcggagcggtggcacggcaaatacctatttatgttgacgggatttctctttatcccgctatttgctgggcaataagacccccactggttacagtttcactttataaaaaatagcttgagggtttttgatttgtatttcttttgtgtaatggtatatactggataaaagggagagtttacataaaagttacaattctatcaaactcaaacttttatgtaaatatgtatagacatttataaaagaaaagagtaatttatatagagtgaaaaataacttgtaacattttataaacatattgtaaaatgattgtaacaaaacatacataaaaatgaaataaatacataatagtgatgttggggaaagggagagagtatattgttccgtaaagtaaagggtatattagttggggtgttatgtgtagctataataagtggctgtggtgcaaaagtaagtgatgttgcattggtaagtgatattggtgggcacactgtagaggctaaagcagaagtacaggatactattagtttagttgatggtcgaactggtactgaagtgaaaaaattagatttatctagtttaggctattttgaagatgaagcgaaatttaaaaagtctgtcacaaaggttgttggtgagattggaaaaagcgtcgacaaaaaaatggttccttcacgtatagcacctgatggaagttggcaagaaggaaaaccttcttatgaattaatggaaaaagaattagtagataaattgttaaatgttggtatgtgggatgctacgtatcagttgccgatcgtggagaaaaaaccagtcgcaacattaagtgatgcgcaaggaaatggtgcggtaattggtagatatgaaacgaacttaggtggttcaacaggtggccgtattgagaatattcgtttgtcagcagcgagcataaatggagttgtgttagcaaaaggagaccgtttctcttttaattcattaatcggtgatacaacaccagataaaggatatcaattagggaaagaaatagttgatggtaaattagtagatggatatggcggtggtgtttgtcaaacatcttcaactttatacaatgcagcagatcaagctggcctgaaaatggtggagagaactacacattctaaaacggtaggttatgttccacaaggaagagatgctacaattgcatatccatatttagatttagtatttgaaaatacgaatgatgcacctgtgaagctttatatgggcattcagggtggaaagctagttgctgaagtacataaaatgagataagagttataaagccaccttttctgaaatttagaaaaggtggcttttttattatgaaaataaaaatgtatataaattctgacttttcttatttacataggatgattttagttgtatccttcatagtaacggttatatgtaatggaaaaatatagggataaggagatggagttattcatggtacaaattcatccgaaaacacgtattggtcatgttgaatttaaagtgaaagacttagagcgtcaaattgctttttatgagaatgttgtaggattagaggtaattaagcaagaggggaataaagcatatttatctggaaaaggtggaaagaacgcgttacttgttcttgaaaagctagaggacggggtactgcaagaaccgcgtacgactggtatatatcatgtagcctttttagttccgactcgtgaagcttttgcttctgcgctatttggggttcttcgtaataagaatgtaattgacagcccggatgagcaagaagggcgttatacatattcaaatgaaattttaccaatttcaaggtttaatagtgcaagtgatcatacatatagcgaagctttttatttgcaagatttagaggggaatggtattgaaatttatgcagaccgtccgcgtgatcaatggggagaagggtcaggaggaagtacaccacttgatttaaaagaattggcgacactcgttgattatgagtttgatggtttgcctgctaatactgtcgttgggcacgtacatttacgaatagctgatgtagagaaatcacatgaattttatgtggaaacagtaggttttgaagtacaacagcgtgaagaggattgcttatttatttcagcagggggatatcatcaccatattggtgcaaatacgtggaacggagtaaacaatccacacccaccagtatatgcaactggactaaaggtatatgctattgtactaccgcataaagaagcgttagacgaagtgaaagaaagattaatagaaaaacaacatgaaataaatgaaactacaaatgggtttgtggtggtagatccaagtggtattacagtgcagtttgaaatagaagcagtgtaaaataagcgagaaagtgtataatcactttctcgcttatttgtaattattcatagctcaatccaatatcttcttactatattcccatcttcctcagtgaaatcatcatcacgaatcccgccgttatgcaaaatcgttttttcagaagcggtattcacagcgtcgcaaacgacaagtactttcgtgatgtctaactccttcgttttttctaatgataatgctagtaacttcgtagcataaccttttcttctttcagaagggcgaatgccataaccaatgtgaccgccagcgttaaataaatgtttggttaaactatgacgtatattaacagctcccacaattttattttcatctgtaacaagccaatatgtagagtctggtacccaagtttcagggatatttattccgttatgcgcatcgagaagttcttgaaccatagctgggaagttggcaggattttttgagataacccacgggatcattgtttcaccgctatctttccattcgttatagaaatctaagtattcttcttgtaaatcagtagtaggtgtgagtaatgagacgttcattgttagtaagctcctttatttatatagtttttataaaaaattacgatacaaagtgaaagcgttttctataatttctcaacctaatttcatgtaatccatctttgtttttttagaaaattagtggaggtttaaaattagaagttatttattttatgttaatatttaaaatattaacataaaacggtcggagtattaagtatattttagcggtatccctacatgtaaataaaaggatgtttgtgataatttttgttttatctatctataatgaatgaaggggggaagtgcccgtgagtgtagattttgattttattatacgaatcggtgttgctggcttgttaggagcaatgattggtattgaaagagaaattcgatcgaaagaagctggattaaagactcatttcctcgtagcggtaggaagtgcgttaataatggttgtttcgaaatatgccttttcagatattgtgtttgaagagcatatatctctagacccaagtcgtattgcagcacaagtcgttagtggagttggttttttaggtgcaggcacaattattattcaaaagcaggcggtgaaaggattaacgactgcggctggtttatgggctactgccggcataggattagcaattggagcgggaatgtatgtagtaggcattggagcgacgattctcgttttaattggtttagaaattgtaagtcgtatttttaaggtgcaatttttatttccacaaaatataacagtgcaaatgtttgtaaataaacatgaagcggtacaacaaatattagaaacactacaagtgaaaggcatcccaatactctcatatgaggtggaagcttcacagcaaggtacagaaactgtttataaggtagggatgcaactgaaaaatatatcgtcagaagaaaagaatgagtttattcagcatatgcaaacattaccggaagttacatttataaagttaaaatcatagtgttgaaaacgaggatagatgtagcaggaattttgctattatctatctttttttgatataaaatgcacggaaagtcaagcgttaattttatatggaatggatacatgtgtgaacgttaccttattttttctcaatacaggacaaaaagtaaaaatagtaaaataatggagcgggacactaaaaatgtaaggtaggggagagcatgaaaggctattcaaagaaaatgttagtaggggtaagttttgctagtttaatgttagggagttttcaaggggtaagtttggcagaagatactaagggagagcaagtttcttatcgaaatgtgctcaaaatggagccagtcggtgtacaactaccagtacaagaattagctcattcatcgaaagtgctcgaaagcaagtcttttgagaaaaggttacaatttgccgatttatcacaaagaccacctgaggtgaaaaaagaaagtaagcaattagctgtagcgaaaacttatacaattgccgaattaaatcaattaagcaatcagcagttagtagatttacttgtaacaattgattgggagcaaattacggggctatttcagtttaatacagacagtctagcattctatcaaaatgatagtaggatgcagacgattattgataaattgaagcagcaaggacaagcctatacgaaggatgattcaaaagggattgagacattagtagaggtattacgttcaggattttatttaggattttataattcggaacttagtaaattaaatgaacggagttatcatgataaatgcttacctgcattaaaagcgatggctaacaattcaaattttaagctgggtacattagagcaaaatagagtggtatcatcatacggaaagttaataggaaacgcttcgagcgatgtggaaacgataacatcggctgcaaagatttttaaacaatataatgataatttttctacattagtagataatctttcagctggaaatgctatttacgatattatgcaaggtgttgattacgacattcaatcgtatttgtacgatacgaggaaagcaccgaaagatacagtatggtatcagaaaatagatagttatattaatgaattaagtcgttttgcattaatgggaacgattacagcaaaaaacggttggcttattaataatggcatttattatacaggtagactcggtatgttccatagtacaggaactaaagggttacaagttgtaacagatgcgatgaaaatgtatccgtatttaggggagcaatatttcgtagctgctgagcaaattgcaacgaattatggcggaaaagatgcaaatggtaaagtggtgaatttagatcaaataagagaagatggaaagaaaaaatatttgccaaaaacgtatacgtttgatgatggagcaattgttttaaaagctggagataaagtgacagaagaaaaagtaaaacgtttatattgggcggcaaaagaagtaaaggcacaattccatcgtacggttgaaagtgatcaacctttagaaaaaggaaatcctgatgatgtattaacgatggttatttataatagcccagcagaatatcaatttaatcgtcaattgtacggttatgaaacgaataacggtggtctttatatagaaggaacaggtacgttctttacttatgagcgtacgccagaagaaagtatttatagtttagaagaattattcagacacgagttcacgcattatttacaaggtagatatgaagtaccagggttatggggacaagggaaaatatatgaaaatgaaagattatcttggtttgaagaaggaaatgctgaattttttgcaggggcaacgagaacggataatgttgtaccgagaaagagtattataggaggattatcttcaaatccagcagagcgttatacggcagagcgaacgttaaatgcaaagtatggaacgtgggatttctataattattcctttgctttacaatcgtatatgtacaataagagatatgatatgttcgataaaatacatgatcttattaggaaaaatgatgtaacagcatatgatgcatatcgctctacattaagtaaagatgcgaatttaaataaagaatatcaggactatatgcaaatgctagttgataatcgtgagaaatataatgtgccattagtatcagacgattatttagcgaatcatgcatcgaagccagtttcagatattgcagcagaaataacagcggaagcaaaattgaaaaatgtatcagtgaagaaaaataaaccacagttctttaatacattcacactacaaggaacatatacaggaactgcagcaaaaggagaatatgaagattggaaaacaattacacaaaacgttaatgatacgttaaaacgtttaagtgcaaaggaatggacaggctataaaacagtaacagcatactttgtaaattatcgcgtgaatacatcaggacaatttgaatatgatgttgtgttccacggtattaatacagaagaaggtgcagagaataaagcaccagttgcagttataaacggtccgtatagcggaaatgtaaatgaagcaatttcatttacaagcgacggatcaaaagatgaagacgggaaaattacttcgtataaatgggagtttggtgatggagcagtaagtaatgagcaaaatccaactcacgtatatacaaaagaaggaacgtatacgacgaaattaacggtaacagacgataaaggagcaactaatactgctacagcgactgtaactgttcaaaagaaagaagataacagtgtagaaaaagaaccgaataactcattccaaacagcaaacaaattgcagttaaatcaagttttacgtgctagtttaggaaatggcgatacaagtgatttctttgaaattaatgtggagactgctaaaaaccttcaaattaacgtaacgaatgaaaataatattggaatgaactgggtactttattctgaagcagatttaaataattatgttacgtatgctcagcaacaagggaataaactagtaggtagttactatacgtatccagggaagtattatttacatgtgtatcagtatggcggggggacagggaattatacggtggaagtgaagtagtaaaaggggagttatcttgttcaatgaatggaaaaaggtctgtactttaatgaaaaaacaactgcaggcaatgtctctaatgataataacaaattaagtgtcgcgagatgttatatttatattaaaccaatctaatcagtaaataagataaaatagatgaactagtatttcatcacgatgtaagaaaagttataaatattaagtgtttttaattgaattaaactaaaggatcagagtgtatctgtaacaatagataggctctgatccttattatatttaattaacgcatatgaatttaagataattaataagtaagctagctagcgggattcttaaaattcatttatgtaattaactaaacagaaaattgttatcacattagcaagggatactaatagaaaagcgtgtccctttacctaattcactctctatttctatatcaccgtttaattctctaataatactataagcaatcatagtaccaagcccagttcctttttctgttgttgaatagaatggcaaagcaattcgttttatttgttgagatgacatcccaattcctgaatcaataatatcaattatgatatttccttttactttttgtatatttatttgtaataatccaccatttttcatagcctcaattccgttttggatgatgttgtttagacagagtttgaatttttcggggtccccatttatataaaaggaatctgtactattttgtttgatttcaactttgtatgatagagcgagtggtgaaatagtatctttcacctgatttaaaatgtgattaatatctattttttcttttagggtattctgtggtttggttaaagataaatagttattaatagtagattgtatttgctgcatttcaattaacatgatttctaagtattgatcctgagatagcttagaggcatgtttttcatttaataattgagtgaatccatgtaccgtggttagtggattgtggatttcgtgtgcaattgacgctgctagttcgctagctatataaaatttttcagctcgttgcagtttttctttcattttatatttctcaatcatttcctctataaaataaactgataataatactgtgaaaatattaatgactatataatttaataaaaattctatgagagtagagtctattttacctcctgtatttatttgagttacaataccgcaaatagaaagggaagctgtacatactaaaataagaagtaagcttaataatatctttttttctttaaaatacataggtaataagtaacgaaagagcattgttataacagaaatgatagtaaagataataaatgatggaagaacgccatttccgcctaagtaaaaccggtaagaaagatataaaattcctataaaaacaatgttttttgtatttccatatagaaaaactaatattataggaataaaacgtaaatcataaataaatcccacatgtaaatgaaaaggaaaagtcatacaaaaaataatagcaatggaggaaaggatagaaaataacatattattacatgttattttttctttaaactctagccaaaatacgtgatagctaaggatacaaattattataataaaggtatttaataaaagagtagaaattcccatagttttgcatctccgatagtttgtaagtagaattatgtatgagttggacatagatgtttagtattagtagactttttatctaaaaaaggaagggtacttgaaaagtgctgttatattactcgtattaaaattgataaggaaaatagaaaaaaataatagataaaaaatctatttaaatttatgtacatatgaaatcataaactaacttttgtataggtgaaatttggattgagttactgataaaataagtctttttaagtatgaatattctgtgaaaaagatatgcgtggtgactcctgttttgtagccttcgttatattaacatggaatatatcaaattacaaagtgaaattttagaaaaattttattagtacattttatctgaaatagaaatgctatttatttgagtattttggtacttactcgtataaaactttgttagaaaaagactttaaaatttacatgttttttatgaagtgtaatattgtagctttatctatggggctttctcaataactattaaggcgaaaagttaaaatatataggtttatagatatgaattattacataaaaacgcacttaaaaaaggatgtatgatggtaatagaatacaaacatcaagggggaacttaaaatgaagttaaataaactagtgcttagttgtggagtagtttcagcattaacacttggtgtgttagggaataatacttatgctgaagaagtacacaaaacgaatgatccaattcatgtagttgaacatgtttctgcagacttattattaacccaaacaatgaattatagtggcgaggctgaaacttctttcgtatatgatgggagtactgacttaagcttctctatgaaaaataatggtcaaaatacaatgggatatagtgtaaaaggtccaaatacagagctaattgttggtggttatataaaacctggagaacaacaaattaatgttacaaatgtacggaatgctttatctccattaccgaatggaacatataaaatttacgtttcaaatgatgatggttctaaggggcaattccaagtttcagtaagatctgtgaattaaatttaaaacgctttgtttttaagttaatttaatctttgcttattggaaagaagctaaaatgaattgagaattaccgataaaaatgaaaacgagcaccttatctaattgtgagagggtgttcgttttttgctattaaacagaaaataattataaatatattttgatatccccattgctaacctactagattgtgtcaacgagagaatgtctactataaaagatattaaaataaagatgatgtaacattccgctaaattatatggggaaatagaaaaaccacccttatatgagtggtttttagtaattatttttaggttatacatttaaaattaggctaagttatagaaataataaacatttaatctgttgttattattttggttctggataatgattgtagtatgagattctaataaattcttggtagacatttgttaatttggcatctctaagagcatcgttgaatttttgcatacgtacactcccttgagcgtagcctccacctggagtataagggtttctagcttcaaagtcatccaaaaatacttttaattttttatagtcttgagattgatagaaagccacagcctcttcaggagtgacatcaaagtaagaggatgacgttgagttataagaagctgcttgagcagtaggtgcctctagcatagttgcagctccaccgaacatagtaagcgccatagaagatacaataatttttttaaacataataaaacctccatgtagaatattagattaatagtaatcctgtaatcattatagttacaatgaaaatgattatcaaatgcaatattgcataatatatctcgttatttttgggcagtaagactcccgcacaaaaattcaatgaaagtaaagaagttaggtgggaatcgggcggattaaagtttcactttattatttgaacgagaagtcacctttatatttaaatgaaggagtgtaatagattaaaagaggtgtataaattactcaggttaacaagaaaatgaaaaggctatttttaataggggaaagcttaataactggagtaaaggaattgctatttatatatttaacatacatatttgtcttttaaattgtaggcgtgttttagaatttgtatatagtaaattcgttaaaaaacttgataaataataaaatgtgtaaattttttgactattttattaaaattatttaatatttgtaatttattgttttataatgataattgggtcgatcgtgaatgttttagatattgcgatatatactcggattaatttattttagggaggttacaaaattgggtaagagagtcattataagagtttttacattattatcagtactggcattattccttaatgtatttttacctagggctagtgcagaggttatgacgcatgagaaatattcaatggactggagttatagtaatagtctaggtaagtacattcgcactgaaatgattaaaaattcaagtggtcaaattgcttattgcttaacccttggattaaaatcaccaaatggtgaagatcttcctgaaatggggaaaacagataatgtagtatatagagtcttattaaatggtttcccgcaaaaaagtgctgaacagctgggagtagctaataaaaatgaagcgcattatgcaacgcaacttgcggtttggaatgcattaggtcaactcgatgtaaatgaattaaaacatgagaataaaaatgttgaaaaagcagctaaggctattattagtaatgctaacaatagtgaagagactcaagatgtttttatgaatgtgattcctgctgaaaagcaaaaagcagaattaaagggtgaattcttcgaaacaaatctatattcagtacaaacaaatgctaagagtggttcttataaggtagtagcgaaaaatgcacctaatggagttagaattgttagtgaaaatggagaagtgaaagatcagctttcagttggagaaaaatttcgtatccaaattcctaagaatacaaaaacgggtgaatttaatttaagtgttgctgctaatttaactcaagttcaagcaattgcttatcgtggtacggatactgttcagaatgctacagtactattagagagaaatgaagaaaagcttagtagtgatcttgcagtaaattgggaagcagctggttctttaaaaattaaaaaggttggagaaaatggagaagttttagctggtgcagtatttgaggtctttaatgcaaataatgaatcagtcggaaaaatcacgactggtgctgatggtatggcagaattaaacaacttaccaattggtacttacacattaaaagaaattaaagcaccaacaggctatgtttcagatgataaaccacaaactattgaagttaagacaggggaaacaggagctgtccaaatagtaaataacaaagtaaaaggtaacatcgaaattaaaaagcttagtgattcaggaaagattttaccaaatgttgaattcacagtcttcactgaagatggaaaagaagtgaaaaaagtagtaacaaaagaaaatggaattgcaaacgttgaagatcttacgtatggtaaatattatttcttagagacaaaaacacctaatggatatattggaaataaaacaaagtatccttttgaaattaaagagcacaataaaacacttacttttacagtggaaaataccgaagtgaaaggtagtgtaaaattactaaaagtagataatgaagatattagtaaaaaattagaaggtgcagcattcgagctaaaagatgcaagtggaaaagtagttggggaatataagacagataaaaatggtgagattaacgtcaaagatttagcgtatggtaaatattcatttgtagaaaaggcttctccaaatggttacgttcttgttaaagaaccgattatgttcgaaataaaggaacatggaaaggttattgagttattggcagttaatcatcttatcaaaggtgatctagaaattacaaaggtagatgtagctgatggaaataacaagcttccaaatgcagaatttacgatttataacgaagcaggaaaagaagtagtaaaaggaaaaacagacgataaaggaatcgctaaatttgaaaagttaccatttggaaaatacacatataaagaaactgttgcaccaaacggttatgtattaaatgaagaaacgttctcttttgaaattaaagagaatgatcaaatcattaaacacattgtcaaggatgaaaagattccttcaataaaaacaacagctactgataaaacagatggtacaaaagaaatgcacacgtctaagtctgtaacaatccaagataaagtggaatacaaagacctacaagtaggtaaagagtacactttaaaaggtaaattaatgaataaagagactaataaaccattcgttgtaaatggtaaagaagtaactgttgaaacgaagtttacaccaaaagaagcaaatggttctattacactagatttcacttttgatgcaactggtttagaagaaaaagaagtagtagtattcgaagagttactgaaagacggaaaagttgttacgacacatgctgatatcaatgataaaggtcaaacagttaagttcgttaagccatcagtaaaaacgacagcaacaaacaaagctgatggtggaaaagagattcattcaaaggattctatcacaatccaggataaagtggagtacactaacttagttgttggtaaagagtacactgtaaaaggaaaattaatgaacaaagctattaacaaaccattactaattgatggtaaagaagtaacagctgagactaaatttactgcaaaagaaaagaacggttttgtaacattagactttacttttgttggtgctgaacagcaaggaagagaagtagttgtgttcgaagacttattacatgaagggcaagtaattgcaactcacgctgatattaacgatgtaggtcaaacagttcgatttgtagagccttctattaaaacgacagctacaaataaagctgatggttctaaagagttagacgcttctaaaactgtaacaatccaagataaagtggaatacaaagacttaatcgtgggtaaagagtacgtagtaaaaggtaaactagtggataaagcaacaaacaagccattattagttgatggtaaagaagtaacagtagaatctaagtttactgctaaagagaagaatggttctatcacattagacttcactttcaatgcttctgcattacaaggtaaagaagtagtagtatttgaagaactgtatcaagataatatattagtagctattcacgctgaaattgaagataagggacaaacagtgaaatttaaagagggaaaatcggaacaaccaaaaccagaacacccaaattcaggtaaaaatacgccaacaccagagcaacctaacgagcaagtaaaagaacaaccacaacttaagaaagaaattcaatctaaaattggatggttaccgcaaacaggtactaatcttacaagttggatctctatggctgcaggagcattactgttaattgttggtggagtgattttcttaaaacgtaaaaatgcatagaaattaaaaaataagcacatctgtttttataacaagatgtgcttatttttatcattttagccaagaagactcctatatttaagcgtgaatggcatttaaaatagcaaccatattttataggtaattttgaacagttaaaagaaatattacaggagggtgaaaagcaaggagtttttcatttcttctccataaatcatacaatacattggatcacttctattgttttatttccaaagtttaaaaagtttattgattttttaggaccaaatgaaacgaatgatacaaatcatgaatggatgccagaaaacttagtggacaggattgttactgcattaacagataaacctaatgtgtaaattattcagtgtttatgaattctattattactatttaaagcctaatttctcaatgtattgtagagaaattaggctttttttatcaattcattaaagtttttataattcaaggactcaagttaatgattatattttcaagtattcgttttgagctacatagatatagttttcgttgcaactgtttgttgaaatattttatcatgctcaacaataaccattgtgggattaaattgttgaataagttcttcaatctgcatgcgggaatagatatctataaaatttagtggttcgtcccatatatatatatgagctttttcacataaacttttagcgataagcagttttttcttttgtccaccagaataatgagatatatctttttcaaattgaattcggtcaaagtccatcttacttaggatggacttaaataaggtttcatcaatcttgtgctcttcaataaagcctgatagtgatcccttcaaatgagaagtatcttgttggacataggaaatgatgagtcctgtacctaaagtaactaagcctgtatgctgtatcggatgtcctagaattagttttaggatactactttttccgctcccattcgttccatcaagtacaattcggtcaccttgttcaactatgaagctaatcggctcattcacaatttgatcattgtacttaacggacacgtcaactaaagtaaccaattcatttgatttaaattgcaattgttccaattttaatgactcagttttttccgcattttttagtaattttgatttttcctcaatagctttttgttgccttgattcaaggttttttgctcttttcatcatcttggctgctttatgtcctacaaaccccttatccaacttagagcctgaattcctcgttccattttttgaagcttctacgtcattagaccaacttgctgaacgtttggaagactgttttaatcgccctatgtctttttgtagacgctcatttgtagccttctcgtgttcttgctgtctatcaaaatttaacttccaagaagaatagttaccactttgaacttcaatatttgctctattaatagataggatatggtcaatgcacccatctaaaaagattctgtcatgtgaaattaaaataaatccttttttcttccttagataatcggagactatctttcgtgcatctgtatctaagtgatttgttggttcatcaattaatagaaattgacccgcatttaaaaacagtgcagcaagcaacacttttgtttgttccccatttgataatgttttaaatggtctgtacatgacctcagcatcaacatttaaataggatatctcacgtagaagttcccaatctgcggcttggggacaaatttcttcaaggatttcatgagtgaatttgttcttatctgaaacagagtaggggaagtaattgaattctactgaagcaaggattttcccgctatactcataattccctaacaataaattaaagaatgtcgttttacctcgtccgtttctaccaataaatcctagcttccaatccgtatctatttggaagtttacactttcaaaaatattatcaaagctacctgggtatgaaaaagttaagtcttggacctttatcattgacataataattcctcctttatatatcgaaacgtttcatataaagtcggaacatccatccattttttaattcctctatataagtttgatggatattaacgacttatatagagcattacatgtgtaacaatagtatctgaagtactcatttttctcgctcctttatttgtgaagtacatttaacaattagtaagtttcaactaagacaaacgggaataaaaaaatcccccaatttgtaatcggaaggattagtctttcgtctatacttaataagtacttattaatcatttgaatcatgacaaataaagtatgaactgaattttaaaaatggatagactaaccctatattttgtagtttgaagttataaaattcaacttaaaatataaattagttaatcattattcatccatcattcctttcataattctatttttagagtaacattctttttagggagatgcaatattagcttcaatttcatctaattctaaatcatttataattctttgagtaaggagataaaactttaccgccctttttataaacatcacatttttgttcaataggtcatgtcttttgtccgttaaaaagggaggatatgaaattgacatcaactttttatgtaactataatagttacagttggtttcgtaaactaatttgaatttctattttaatgatagtatattttcattcctttttaagtgtgacagatagcaactataatccaatagaggagtagattctatctcatatgtaaagagtagataagttgtacccgccaaatttacgatgcgcaaatacttaaaaaactacatttttcagcttatcctttttagaatcctcagtattaataattgtaaacatctacaaaaagttaacaagactgttgtatgtagaaagaaatcttttaaaaaggtcataatatggataataggtagcacacatttaaatttagtaggagttgtgccactatcaagacattttttaataaaagtatagaaaaaactcaagaaggtgagtccattgcgtaagcatgcatatgtgcaattttatgtattgatattggctttaatagcttatataagcttttgctttatatttttatttgtttttccgaatcattatttcgtatcagattttaatatccgactatcatctttagtcgttgaaactactgtatttatctcattactgtattctatattatcccaaaaaattaagttaggagtattctgggtttgcattactattgcaatagggtgttttttgataggaaatttcatatccgcttttcaagtacttaatgtagaattaccaatacaaaattttaatatttctgatgtatttctactgtttttcttattcttctttctttttgcgttcttttataaaattatgatggaatgtaataaatgggagaaagcatatttactttgtgatttatgcattgttgttactgctatttttacattagagtggtacctatttaataaaccatctgcaaatattttattcttatcaattggagatgtttttctctcatttatttttccgattatagatttattgcttctattacttggagttacactgatctttcgacctgctattttcaatgcaaaaagtaaattgtttatttttatcctagtattaactggattggctattacggactatttgtatttttacttacaaggtgatttgtcagagcgttcagttatatttttaaggtgtttgtatagagttttcctattatttatcgctattgctgctacaatcccatgcccatcaacttaaggatagaaactctacggttttccattaattgaaatgaacaaacttttaaacagtataatcctcttaaaaatgagcatacgaaataaaccctaacgggtttcatttttttcttatgcagctttcttttgttttctcaatccattatactcatagacaacacccataatatcaaagatagttttcttctcatatcgatgggatttccggccatttttctttagtagggtaaacaggcggattaaaacctttgttattatacgggtgtttctctgtatcgcttgatataacagggatagatgatcttgaatcatcccaattgctttatattcgcttagttctcttttgtgcttttgcaacagaagttggcgcatcttaaacatcgtggaagaacatataaaaatggcaatgagttttccatacacatggcattctaatcgctcttgtttgatagtttgccaatgatgaatttgaaatagagatttccacgttttaaatatgatttcgatctgccagcggagggagtaaaaatcatggatttgttccatcggaaccacttcaaaacaccccctatttatataaaaaactccccttgacttctcatagttggtctttcaaagtaaaaaaacacacccatccctaggaaagggacgaatgtgttttcgtggttccacccttgttccaatctagacgtatttcctcctagattgctcaagttcagataacggctgataccgccaataattactagattactcgttcactattgaagttcaaaggtggtaaaatcatttctcgtgttaggaagctcacacccttggcttccctctctgtaaaccgtaaaaatgatttcgtgtccttatcgttactttttcgttcatgtttatttgttaactcattatactcgcataaaaaacaaaatcaatactattttttaattattttaaattttcaatctcttataccataaaaaacacactcatccctaggaaagggacgaatgtgttttcgtggttccacccttgttccaatctagacgtatttcctcctagattgctcaagttcagataacggctgataccgccaataattactagattactcgttcactattgaagttcaaaggtggtaaaatcatttctcgtgttaggaagctcacacccttggcttccctctctgtaaaccgtaaaaatgatttcgtgtccttatcattactttttcgttcatgtctatttgttaacttattatagttatcaaatttttaaaaagcaagcctatttttactaactattttcaaaatgattttttattatatttcacaatagcattatgcaactgccactcaatttacctattttgtcatttctccagttaataaatcaacggttcatatataaagtgaaggctaataatcagtggggattttgttcatccccactgattattagccttcaccaatcgggcttttacgggcagttgatccccacctaacttctttgctttcgctgaattttgaggtaggggtgttactgcccgttaatgcgggataaatccccattctaaaacccgtacatactcaccttacaaaattatatcaataaaatttttaatacaatctttttgtataactttcttctaaagaacgtgcaacatcttcttctgaagcattcactttcgcatgctctaacaacatttttgctgctgaaggtaactcttttttatttaaccaagattctggatcccatatcttcgaacgaataaacgcttttgcacaatgaatgtaacactcttctatttcaacaacaattccaagcaacggattacgtccattcgcctgcatttctttcaaaatttcttcatagtttgtaatatacgctcggccatttattctaagtgtctccccaagacctggaataaaaaagagtagtcctacacgtggatttgaaataatattcaaaatggagtctatacgacgatttcctggcctttctggaatgataattttattattattgagtacgtatacaaatccaggtgcgtctcctctcggcgaggcgtcacactcccccaacttatttgcagtagataatactagaaaaggagatttagaaaggaaatctacacaatggtggtctaatgatgaaataacttttttcaatgctcgctcacttggtttccccaatattttccgtaactcttcctctgttgaaataatcgattttatttccatacgctctatctccacttataatcgcccctttttctttattttcccaaaattcaatacgaatattgtataataaaatttgcagaaaggggaattaaaatgacagagtggttaacaatatttgattctgaaagaaatacacttgggaagaaattacgcgatgaagtgcatcgtgacggtgattggcacgaaacatttcattgttggtttgtagaaaaagatgctaaagatatattcttatatttccaattacgctctaaaaataaaaaagaagctccacttatatgggatattacttcagctggacatattatgcatgatgaagatgtacaaattggtggtcttcgtgaaatcgaagaagaattggggctttcctttcaaactactgatttagtatacaaaggaatctttaaaatagattatgaaatttcaaatcttactgatcgtgaattttgtcatatgtattttcacaatgtcatcaatccacttccattcgcaccaggtgaagaagtagacgatgtgatgaaagtacatgcaacttcttttctacaactattaaatggtgaaatttcatcttttacagctagttctgttttaaacaataaaccaattacaataacatttgaagatatttatccgtatgatcttgcatactatgaatttgttatagagaaaggaaaagaattattaaaaaataatagtttataaataaaataggactcttagcataatattgcgtagagtcctattttttattattgttcaagtatctttaatttattctctacttgtataaataaaagaataattaataacagcataaccaccataatcgctattattgtatgtggatatctaaacagtatactaataacacttccaattaacatcatgatgaatccgttttgcttcatcacttctgcactatacctgttacccgcatcccataattccttatttttcatagatcgtttcgtacgataaccatatgccgcattaatatcggtcggtggatttttttgaagaacaattgccgcaagtataaatatagtacctattaaaatactcattcctatgtttattagtgcatacatcaattatatcccctcctaacttacaccttcattatacgacatgacccttttttcaaatttataacacattcaatttctttcttttgatgtgtggaacatacttggaagtgttacaaaacgtgcccctttcgtttttaactgcggaatgattttgtctagtgcatctacagatccttgtaaatgcccacctggtgttgaatgctgaaggatgacacttcctggaaatgaattccctaatacattatttgtaatcgtatcagcgcttacacctttccaatcaactgtatcaacactccactgtacaatcataaaattttgctctgttgcccacttcaattgctcttcaagtatttcaccgtatggcggacgtataaacttcggtgcataaccagctaaacgatttaatatttcttccgtttttattatttgattacgatactcagcatcatttactttcgctaagttcggatgactatacgtatgattaccaattacatgcccttcatttgcaatacgctttactacgttcggaaatttttctgcgttttcaccaagtaagaaaaaagtagcttttacattatgttgttttaacttatctaatatttttggcgtgaattctaaatctggtccatcatcaaatgtaagagcgacttccgctttattatacggtcctgaaaatgcgtacgcatatttttcgacccacgaaaatggtgtccacgatccacgctcatatgctttcatttgtacttcatagttttgagggatatatgcgtatggcaatgaacttatatagtctccataataaaatgagttatatggcatataagcatacgaaacatctcgttctagtccccattgatatggagcaaacatttgtggcgaataaaaataatacatgataaaaaaacctccctaatttttcatatgtgattcctctgcactttgttagagaaattgttattcataaacaaaaaataagactgtccttaattaggacagtcttgctgctttatattattaatacatcgatgtactatctttcggcaaagctttcacatgttttaaatagttcgtcactttatcatcctcatcttgcggatattgatattcatatgtgttagcgatttcgttcgccacttccctaaataaatcacccatgacaaagaatgactcccatatgttttcatattctgcattagaaaatgtccttttaaattgctcccacatatcttcttcaatatattgctcgaaatgctttccaaacttccctgtattaactgtaaagtctgttttcataccaatatgccattctagcattacgatgaacatatctcgcactggtccttcaagcattccttttgcataagaaagctcttctctccatagcccttttgccacattcgtactacaccaccaaaattcattacagcaatccaaaaactctttttctgtaggcttttttattaagtaatctttatcgcttgctggcgggaatccttccatacaattatctttatcaagaagcagtttacttaaactatcttgtccaacgaacttttttattaactcaactggaactagcgttaaatcaatccgattcccatccatgaactgcattaaatatggaaacttcccatcttcatctggttgaactaacgacatttcttctggcatttgtactatcattatttctccaaatctatgaacccaattatgattagacgtaaaagattgtatatcatttacaacatacataatatcatagtcttgaaaacaatctcttttcacatttggatttacacgcgatccattcatgataactgctcgaattctttcatcctcttttgctatatttataattacgtctaacatttctttttcagttctcatctacttatatcctccaattttttaatatataatatagtgttatgtatattggaggtccacgagctaatctcgttatacacgatacatgttataatttttgaaacttctttttcatccctttttcctccttacatcactcttttacaactgccatccctttcaatttcccaatgctttctaccattcacttttaattataccgaaaattctgtctcgaatacaaaaaataaagaagggacatctaccccttacagaatagatatcccttcttttaaagttaaatttaattcctatggattagtagaccaaagcccagcagatttaataaatgtacgtttatttaatttcagctgcgctacgataaattctgcaatatcttctgcttgcattactttatcagggtttccatcagttaatcctaaatctacagccatatcagttgctactgtacttggagttaaagctgttacacgaatgttatgtttgcgaacttccatcgctaacgattctgttaagccaaggacaccaaatttagaagcactatatgcacttgttacaggtgcacctttttgtcctgctgtagatgaaatgttaatgatatcaccagattgttgttcaatcatgctcggtaaagctgcacgagttgcatagtatacacccattaagtttacttgaatgattttttcccaatcagcaacgtctagttctaaaaacttaccgaatttagaaataccagcgttattaattaaaatatcgatagatcctaaaccattttttaacgtttcaatcgcagttgttacttcttcgcatgaagaaacatcagcagttgcgataacagcttttacaccttctgcttctacttcttttgctacagcttttaagttttcttctgaacgagctaataagcctacatttacgccttctttcgctaatgcgattgctacagcgcgaccaatccctctacctgctcctgtaattaaagcatttttaccttgtaataattctgccaagtataacactccttaatcatctcagttatgtattatattaaaattgtatctatgtttatgtaaaaaggcaatgatgcactttcatgtgcgtaggttacttgtaggtaactatagaaagtttttatttataagtttcatttttttaccattattcatgtaaaataaaaacaaatccagcataggggagtgtatgagtatgaaaagcgaaggaaaagcttttcaatataattgcagtaacagtaaatgcatttttaaagagaaatagtgttagaaggttctccttctaacactatttctcttcatgattcggcatacgcacaataaattcagtaccttttccttcctcactctccacttttatctctccttgatgaaggtcaagtactttctttacaatagctaaacctaagccacttcctccataggcacgatttcgtgaagaatccgctttataaaaacgctcaaaaatatgttgtttctgttcttctgatataccaattcctgaatcacggatacgcacttccactactgtctcatgttcctttaactgaatagtaatcgtaccaccgcttggagtaaatttaatactattatgaattaaattaatccacacttgactcatactttcttggtcagcaataacatatactttttctaaatctagttctaactcaatttctttttcagcccagagtggttcactatttaacacaatttgctttaattgttgatctaatcgatagctcactctttctggtgtatactcttctgattctaaaagagttagctttagtaaattttgacttagtttagataatctcgttgtttcagtttcaataatggtaagataatgctttcttttttcctcagaaagattatcgtcttgtagtgctctagcaaatccttttatagaagttaacggtgactgtatttcatgagaaacattcgatacaaactcttgtctcattttctccatcgtattcagttcatctgtcatatcatttatactttttacgagcacgccaatttcaccatcatacttttcttcatttcttatttttacggagaagtctccttttgcaattttttgtatcggttcaataatagtccaaatcatcgcctctcgttttggtctcattaatattccaatcaatgtccaaataagaataataaagacaaaaccgaccatatcactaattagaaaagcaacaaacggcgatacgtttacgtcaaaagcattcaatatactagttgctacataaaatgcgatagaccaaattatagtaagaaaagaaaagagcgctaataccgctccaaatactttcagcatcttcaacttactcattcgttttctttttctcatttacttacctctaagcgataccctaatcctcttattgttttaatactaaatttcgactgctcttcttgaaacttctcacgtaaccgattaatatgaacgtctagtgtacgttcattcccttcaaaatcatatccccatatttcttcaattaattgctctctcgaacaagttcttcccgatttagaccctaaagtaaagagcagctcaaattcttttaacggtaatgtaaccgtttgttctccagatgtaacttcgaatgttttacgatttaataatacatttccaacttgaatcgattgggaaactgtaatttggtaacgtttcaataatgcctttactctcactactaattctatagggtcaaatggttttacaagataatcatctgtcccaaggtgaaatccttttactttttgtgatgtttcccctttggcagttagcatcagaaccgggatatcatagtattttcttaattcaaaacatacatcaaatccatccatatttggcatcatgatatcaagaataaccatatcgacttttacgtcatccattttctgaagtgcatctactccatcaattgcctcatatgtttgaaaaccttctcgttctaaaaatacagaaacgagttctctaatgtgtggatcgtcatctactattaaaattttaggtatcaaaggaaccatttcctttctacttagcatctaatatattgtttaaaaatgaatcatcagtggagtaaaatcccactgatgattcattttataatgcaccctctttaattttcaattgctgcgttgcaaactcacgatacatatcatgcgtctgtaataattcatcatgcgtaccactacctgtaagattccctttttcaataaagacaattttatctgcatctacaacagtagaaagtctatgcgcaatcactaacgttgttctgcctttcattaagttatttaacgctttttgaacgacagactcagatttactatctaagcttgaagtcgcctcatctagcataagaatttgcggatttcgaagtaacgctcgggcaatggcaattcgctgtctttgtcccccagaaagcttcacaccgcgttctccaacttctgttgcataaccgtttggtaagtcatgaataaatgcatcaacatatgccattgctgctactttttcaatttcttcatccgttacttcgccctcgacgccataacaaatattatcacgaattgttccatcaattaacggactatcttgtgatacgtaaccgatttgacgtcgccatgactgtaatgaataactcgtaattgattcttcccctaatttaatggcgccactagttggctcataaaaacgttccaataatgagaataaagttgttttcccactaccacttggtcctacaatcgctgtcacttttccagattcaattgtgaaatcaatatttttcaaaacttgctcttcttcgttatactcaaaatgtacattttcaagaacgatcggttgcttagcatttgtcactttcacaccagtttcatgatcttctacttcatattctaaaatcgtactaattctttccgttgcaccaattgccttttggaattgtgtaaagaacatagataattgactcattggcattacaatttgaactaaatacaaaataaacgctacaagttcaccggttgttaatgcaccgctagaaactcgcatcccgccataccctacgataataacaagtagtgccattaaaacaaacgacataactggcgaaattaatgcttgcacttttccttctttcaaaccaaattgtaataacttttgtatacctgtattacccgtttcatattctctcttttctgtatttgaagatttcactaaacgaatttctgataacacttgcgttaacacacttgtaaaagatgcagtttcatcttgaagtgcttttgaaatcttatacatttttcgtccaagtggaactaaaattaacacagacaacggaataaccgttaaaagtaacgcagtcattttccaatctaaaacaaataatacaattaacgatccaacaattgaaataccacctgttaataagtttgacaaatgctcagaaattaacgttttcacaacacctgtatcattcgtcatacggctaatcgtatcacctgttctattttgatcgtaataagataccggcaagataagtacctttttccacaaacgttctcttagtcccgctacaatcttctgcccaatataatttagtaaatatatagacaaccctgccgcaatagtttgcattacaaagaaagcaattaacccaacaatttgtcctgcactaattgaagaaagcgaaaaattatctactaatccttttgtcagcataggaataaataaactcgctcccgtagaaagcaaactcattaacaacgcaaaaactaaaattcctttcggaggatttgtatcttgaataaggcgtaaaaactgcctccaactcccttttttctttatttcatttctaacttccattcctgttcatctcctcatgttaaacaaaactgttctttctaaaattagaatacgatacaaatgtaaactgaatgtaaacacactttttctatttttacaaaatatacataaaaactcatctttacaacagatataaacatctgatattattacctggtacttaatattattctatgtaaattatagataaataatttaaaacacgatataaatctccagttagtgaaaggagtatcctttttgcaaacaaatatacattctgaaaaggaaacaattatttttattcatggattagttggcaatcgtcgcgccttcaaaaaagagcaaaaacgattttctgcctcctacaacattataacttatgacttattaggtcacggtgatgataaaggagaagcaatcgacttttcattacagcgcctcgtagatcaattattaaacttatatgaacaagaaggtattaaaaaagcacatatttgtgcgctaagttacggctgttacatctctacaatttttgcacaaatgcatccagaaaaggtattaagtatttgtcatattggaggacattacaataacccttctcgtttatataatgtatttcaaaatttttgggagaagcgaggagatgaatactctaaatggctctctcaatacgcaaatactatttttccaagcggtatattaaaagcaaatccgttcgcagtcatttcaagaaatatttactaccgtttcggattacaattacattcatccataattgcccagtcattacgacatcggttagaattcgatttaaaatctaaattaaaatcacttcctcaccctatactatgggtaatgggagagcatgatcatctctataaatcttgtctatttgatttgaaatctattttgcctaacgttctatataaggaaataccgttagcgggacatgcagcgaacttatttcgtcctaactatttccatgacttatatgatcgatttttaaatggaaagttaaaataaaaactattaaacttccaatttattcaactataaaaaggcttcccaagtttccttggaaagccttttctctatacgaaaagtatataaaactactttttcttagtatgcttttgtgtaacctaataggtgcttgctccagtaagagttacttacagaactaatacgtacaccagttgcatctgtttctgcactaatgaactgaccgtttcctaagtaaacacccatgtgagaaggacctgatttataagtattttggaagtatactaaatcacctggttgtggattgctagtttttgttttagagctccagtatccagcaactgtttgacgagcgcctttatgaccagtttgatttaatacgtagtgaatgaatccactgcagtcaaaaccagcaggtgttgtaccagcagttctgtatggtgaaccatttaaagatctagcgaatccagcgattgaagatgtatctccacctgttgttggtttttgtacgtctttacctggttgttgaacgttatttgtaacattattgttatttgtaacgttgtttactccgccttttacaaacttaacgaagtctgcacttacgtaacctgtgcggccgttatggttaattttgtaccaaccattttcagcaccagtaacgtttaatactttaccatttgttactccaccgattacagcgttgtatgtagctgggcctgtacgtacttttaaagcaccagtgttaacaacataagaaccaccagtttgaactgttgtagtattgttgtttgtagttggttgttgtgtttcgttagatacagcagaaccaccttttgttacgaagtctttgcttacgtatccagttccaccattgaagttgattttaaaccaatcttgtacttcacctacaacttgtactgttttacctttgtttacagaacctaatactgtatgagatgtacttgggcctgtacgtacgttaagtgaagaaacgtttactgtgtaagtacctgttccttgttgaacagtcgttcctgttttgccaccagtcgttacgaagtcaccacttacataacctgtttgaccatttacgtttactttgaaccaaccattttcttgtccaactacttgtagcacttggcctgattttactttagaaataacgttatgtcctgtaccagcacctgaacgaacatttaatacatcagcagttactgtgtattttaattcagaagttgtttctacagtttttgtttcagttacagtcgtttgagtttgagtttgtccattaatttcttttagcgcttcatttgaaacttgtgcatgagcagaatccattcctggaactgcaacgccagctacagaagctgctgctaaacctgcaattacttttttcataagttgtctttacttcctttccctactatcctcttaaaaaaaactaaaactttaatactttacaatattatcaaagtaaaatattcatccagttccattttttagcaagagttttatttttcacacagagttcattttaaatgaacaaagtgaaatccgtgtgaacttcatgtgaactttatcattaaacacagtgtttttgcaatggttttttcaaatttcttatatatcgcatgaaaattcgacattctatttaatattttaatataaaatatcccttttctatctattataaaaaattctattaacctaatacaaactcaagtatgtatttccttataaagctccttacatgaagtatactttcatcatgacaaaaatcactctatttatcaatagtataatatttttagaaaactaaatttctatactatctacaattttgaaataatttgacgaattgtaagatttatttcacaaaagccatttctcctttaaagaaaacacacactatatcaactgttctctttttcttataatggaatttataggatatttataggatatttatagtattatatacatatcttaataaacaagaattttagcgaattaattaaagtttcattcccttataaaatgaaactttaatcaggaagggttttatacatcctccgctaattattaaccctcaccactcgggctgcccattaatgcggagttttattggaataaaaagaggaggcatatttgtgagaaatataatagatgatccaatacaaaaaaacatagagctatactatgcttttattcaattcgtttcaatgataacattacaaaaagtatcagctattgaaacacgtaaaaacgaattaaaaaatcagatgaaaaatgccggacaaaaaaacccttattacgtataaaaaaaggtgaacaggttatattcctgttcacctttttaaattatttataaattttcacacggtcctctagcggttggaattctttttcaccagcatgtactaccggtttaccaaatggcatttgtgcaataagtttccaattctctggaacatcccactcttttctcacttcttcatcaattagcggattgtaatgctgtaacgtagcaccaaacccttcaatttctaaagctgtccaaattgcaaattgtaacattcctgatgattgctgagaccaagttgggaaattatctttatataatgcaaagttagcttgaaggctttccactacttcactgtcttcaaaatataaaaccgttccataaccacttttaaatgcattcattttttcttcagtaggtgcaaagttattttcaggtacaatttttcgtaacgtttctttcgtaatatcccataatttatcatgttgttctcctaataaaacaacaacgcgagcactttgagaattaaaagctgaaggtgtatgttttacagcatgataaatcacttcttgaattttctcatcagaaactacttgctctttactaattgcataaatagatcttctgtcttcaattgctgagtaaaaatcttttgccatcataattccctccaattttcaattgaggctattttatatgtatatatcatattacgcccctcaaacttattattaataagcttataactttataatatcacagcaacaaacaaactcaaataataacacttatatttagaagctttttcctttttaaaataaaaagactgtttgttgttatctaaaattagtaacaacaaacagtcttacttatgtagcgatctagattcgtattttacttacttaattaactaatccaaatgcatacgacattaacttatttgtctctgtaaaacgttttgttttactggatgtccccatgaccactgtaataattcgattatcaccttgctttgcagtcccagtaaaacagtatcctgcactatctgtaaatccagtctttagtccgtccattccttctatatataaacttttattatttttgtttaacatgtcgtttgtgcttataacattaatattattaaatgctagctgactttggcgtaagtgagtcacttctaatatttccggataatcttttataagatgatacgccaattgtgctacatcaccagccgtcatttttgtttcacttccatctggctcttgtaatccagaagcatttgcaaatttagcatgttccgacatttttaactgtttcgcttttgcatccataagctgaacgaaatctttctccgattttgccatatgttctgctaaagccacagccgaattattagctgactcaatcattaatgcatgatataaatctttaacagttaatgtgtcattaacttgtactgggattctcgctccttctgtttgtgccgccttcgcactcatttttactggatcttcccagcgaactttcccgttatgtatactctctagtaagagatacgctgtcatcatcttagacatactagccggtgcaaaagcttcattttcattatattgataaataatatctccatcactcgcatcgataatcatagctgcttttgcgttaatttctggtgggatgtactttggcgggactacttttttagtaaatcctgctttaggtagttctgccacttgcaaaggttgtccctctacattcgctatgctcttttgatttccttggaataagaaccaacatatccctaaaataataactaataggactgtcatccttccccattttaaccgattcatttcaaaactcctttagcaaaccttttatacactcacatttaaccttaacaacaattcctttatatagtcaaggtaaaaggtatatttattcatatacagcaatgattattttaatttatttatgttaaacttacaatattgaaacgtaagaatattcaataataaaatctcgtaaataaagcgaaactttaatcagccccaccaattgggctacccgtcaaatagcgagataaactatttaatagaagggattcatacaaatgctacttccaaaatcattaaaatacggagacacagttgggatctactccccttcttcaccagtaacctacacttctccaaaaagatttgaacgagcaaaatcttacttacaacagaaagggtttcatatattagaaggttcattaacaggtcgatatgatttttatcgttctggtagtatacaagagcgtgctgaggaactaaatgtcttgataagaaatcctaatgtttcttgtattatgtcaacaattggtgggatgaattcaaattcaatattaccttatattgattatgatgcttttctaaagaaccctaaaataatgattgggtattcagatgcaactgctttattactaggaatttacgccaaaacaggaatccctacattttatggaccagctctcgtcccttcctttggcgaatttgaaccttttgttgattgcacatacaaatattttgctgaaactttactacatgatcattctcttccttatcatataaaacaaccattattttggtcagatgaatttattaattgggaagaaaagacgaaggagaaagaacttcgaccaaacgattggatttcagtaattgatggaaaagctactgggcgtattattggcgggaatttaaacacgatacaaggaattttgggtagcccctatatgccacatattcaagaaggcgacattctctttattgaggacagttcaaaagatgcagctactattgaaagaagcttttcattacttaaaattaacggtgtattcgataaaatttcaggtatcattcttggaaaacacgagcaatttgatgattgtggtaccaaccgaaaaccttttgaaatactattagaagtacttcaaaatcaaagaattccttttctagctgacttcgattgttgtcatacacatcccatgattaccatacctatcggtgttcaagtagagttggatgcaacaaataaaacgatacatattgtagaaccttggaaaaaatgaattcatagatagcttctattgttttacaataaaagccatgatactatataatttggaatgtgaaaggttaaacaaaatacgttccaatatatatcattagaaaaattaggtataaatatatatttatatgcaaaagagagtgaataaatgaaaccaactattaaaaattacgtatttttacatgtagcttttttgatatattctatcattatggtttacatgaaatgggcagctaaattccccattgcttccatctcattttttgttgcttatttcggactagttatacttttattcggatatgcaattttatggcaacaagtaattaaacatttcgaaatttcaaaagcatattcacatcgcggaattattatactgtggtcaatgctttggtcagtatttctatttggagatactattcagtggaatcatttacttggtgcagctattattatcgtcgggattgtggtggtgacaaaagatgaatagttatatgttattatttattttcgggataattttagctaattactcacaaatattattaaaaaaagctactttgcaacaatacgattctagaataaaagaatatgtgaatccttatgttattatcggctactctttatttgtaattaacgccggattaaatgttatcgccatgaagggcatggcattaaaacaagcatcagcattagaatccttaagttatatcatcatattaatttttggttggtatttcctaggagaaaaaataacgaaacgtaaactcatcggcaacatgattattatcgttggtgtaatcgtttattgtatccaatagtaaaaagctccgtttatcacaaacggagctttttactattgacctaaattttgcactttatctttcaaatctcgaacttgatctaccgtctgcataagctcagagtttttaaattgctctacatccactttgccttcttctatctttgtcttcgccgtatcaattaacgtatttaacttttcgttatatccgacgatttgttgatgaagatcctttgctacatcaggtggcgttaattcattgaatgcgggtatatcttgtttaatttcactaagcttcgtttctaattcttttcgagcctcgctatcattaacggccttttctgctaatgctggtgcatcatttgcaaatgcacttatttcatttacatagtctgtcgccttttgagcataatctatggagttctttccttcttccactattgaacatcccattaaaccaattgaaactatgaatactaatacaattgattttattttcattttagacccccttcgtccttataattgtctgtaattttctctatacataacttctagctaaattgtttatagcctttttcaaatagctatttaccctcttacatgccctattatcgttacaacatctatttctatatgcacgcttataatatcttcaattatatccatatacccttgtcctatagctgttccatagtgtaatgtaagccccttcttttcatacactgactttggcactgaaaaaataaatctcctcaaatttctttcatcagctggttccataattaaaacaatcccatcctcatcaaacatatacgctcgccctccaactttacattcactatggctcagtattgccttggtcagcaaaatttaaaacataataagttaagatacactctgctctatcataaagtgaaactttaattagccctcaccagtcgactctttatcggcaaatagcgggataaaaataaaaagcattcattcttttttgttaagaataaatgctttttaaaaaatcaatttctaactctaacatctttttttgacgaggttttactttccttacgggaactccagcgtaaatataccaatcatctaaactctcttttaccatactcatcgcgccgactgccgtaccttctcctacaattacatttggaaaaataatagaattagcaccaataatcacatgtttttttaaaataactttttctgctttcacattcctatattgattcgggacggttggccccattaatgtatttccactgaaatcatcaagtactgcatatacgattgttttagctgagatgtttgcaaaatcatgcatttcaatcccaacttcccctccatataacgctgtatacgctgatatgtgcgaataacttccaattgtgattttaccacttaaaatgcaaaaatcatcaattcttacatgattgccaactgatatagcactcggattatatatacttgcttttttactaaccaatacatttttcccaacagataaaaatccaattttctttagttcttcttgactataaaaactattcatctaccgacaccaccttctgctctaaacagattacaatttgctctactagttctttcgtcatcccttcccataaaggtaaacttacgattcgttttgctattttattcgtttttgttaaatctgtcgacttatagtttttaaaaagaacttgttggtggcaagatggtgaaaagtataatctagcttctattttctgttttttcagttcttcaattacttgtatgttgcgaacttcttctggacaaatgataggcataaattggtgaataactgcttctgtcttttggactttccacccttttttcattaacccagtattttgtaacaactgtttataccattcagaaatacgggtacgttcttttaatttttgatcccacttttttatagtcgcaatcccaatagctgctgcgtattcagacattttacaattaaaccccatcatcgtacattcacgatttttatcaaatccgaaattccccattcttttaatacgttgtatatcttcttcgtttttactatatatgagccctccttcaccaattccgaatggctttgttgcatgaaagctatatacgatcattccactaaaatcttgaccgtaatgcatccctccattcattaatccaaatcccggcgccgcatctacgacaaccggaatccccttcttctctaattcttcatattcttctaagttcatccatgatccaaaagtggcgtacgggacaacaatcgcaacctcttcttttaattcttctatcttatccaaaagtacggttttatccatataccaatcatctattgaaatatcaataaagtaaggttccaatccacaccaaatagcggctaaggcagtcgcagggaatgtaaagctaggcatgagagcatactttccctttcttcttttctttagttgaatagccgccattaaccctaacgttgcgtttgctactgttgtaacagctcccctgttttgaaaaaatgacgacataattgtttcctcaaaacgttgatttataggtccataattcgtatatatgtgagatgtatcaatttccttcaattcgtccaaatactcacttacaggtacagttgaagcacgtaaaaaaggaatattctccatatctattccttcctatcattttcggacaatatagagcatatctgtttcagataatccaaatttcctagcacttttcattccttgtttttccgctatgttatataattctaccttaaatcctgcattcattaatcgttgaataaatcccgattgattgtaaattctcacatgatcttcttgaccaaaagctaatttcctcaattgtggtgttacaattaattcattctctataataaaatctacattcattacgattggtacttgaataattccccatccatttggctttaacactctatataactctcgcattgctttgtcatcatcaggaacgtgttctaatacatggctacataatattacatcaaaagtattactatcatatgtaattcttgtaacatcaatttccttcattaatggatcctttggttctaagtcaccacatacatacgtaatatttttatactcgttaaaccaatctcttaactttgcttcaggtgcaatatgaagcattgtatagtttctatttaacaagtccgtttccgtttcaatgtacgcacggtacaatctttcacgatccatcgaattacaaactggacatatccctgtatctttattccacatttcaaatttatatttcggaaaatcataatgtgctggccaaggtgaaaatttttcaaattgttgattgcaatattgacaataacaacattctttctcgaacatatgagcaactaacttgtttaagcctttttttatcttttcattataaatttgatctagttcgccatttcttactgcatccttaactataaatcccgcattttctaaacaataagataaactctctttatactcactttcggagcttaaaaacccactattatatgcatctataattaattcaatccactcttcaattgtcattaaaataaaatgcatttgtttttgattttgtccactatgctgtctaaaataactaagaggttcatgtatataaactacttttcctttcctcatcatatctagccaagttgcaatgtcattaatagcagaataagcctttcctttaaaatatccaaacttcccgtcaaacaaattccgattaaacaaaacagttgtcggctcaccaactacatttttcaagttttttaacatataattccctaattcttttccttcaaaaagtgtagtttctttcgcgattttcatatttaatgttgaaggtagtaatatctctccattctcatcaatcagttcacgatatgacgtcacaaatgaaatattttctaacgccaaaaagtatttcatcattctctcgatcttttcatgatgaaataaatcatcatctaataaaaagtttatatagtccccattcgcaagttctacacacttattaaagttttcggcaactaacggcgtttcattttttacatatgtaatacactcatattcacgtaagtacggttgaatcatagcattgacttcattatttgtactgtcgtcagaaataataatttcaatattttcatatgtttgattcaaagcgctgttgagtgctaattccaagtaataaggtctattgtatgcaggaataagtatacttactttcggtaaagaagaattattatttatatgttgttttttcttttctatgtttattttcttcgctctaattttttggcaatagtctaatgtatataatattgatgatggaactatccttcttgcataatctagaaaattagttatcgctttatctaactctttttcagtggataagaaaccatattgttctcctgctataatactgtgtgaaaaatcttctaacccatccatcattttattagattcatttaactgttgatctggatgtaatcgaaagtaactaagtgtctctgctatatatacagcttttcctttacttaataaagataaccatgaagctatatctacgttacataaataccgcctcttatcaaaaatcccaaacggttcttgtaaatcatttttacgaaataaaactgttgtcggttctccaatataatttttttgatccacaattaccttatttcctaattctgttcccgctataatggtatcctcttcaaataaacggacagtcgaataaatatgtcgtagctctttccctttatcatcaatgacttgacgatgagatgttacaagcttaatttcattatctaaatcatcgaaaaaatacttcatcattttttcaattttattcacatgaaatacatcatcatccattaaaaaatttatatattcaccgttcgcttcattaaataacattagcgcattttcaaattgtccgagagttgatctattttttatataaataatatttgaatgatcacataagtatttttgtaacactttttctgtttcatcattcgtgctgtcatctccaactataatttctatattagggtacgtttgttctaacacactacatagcgccttttcaaagtaacgaggacgattatacgtaggaattaatacacttaccaacggaagttgctctaccacctcttcagttctttcaatacgagttctcattttaactctctcacctcttcgcatattatttatatacgcgacacaaaaatcacattactttaactgtatggagcctatatacttttatgcaaacatgaaacaaattatcatacttttcgttcctgaataaacatatttaataatgcggacattttatttgcaccttttttattcatatgatcactatcataaaaatcatcgtcacaaaataatggcgaatcaaatagatctatgatttgaaaagaatattgagtttgaaaatcatttataactttataaaaatcttcttttaattttttactactacaattgaaataatgtgaagtaacagggaacacaacaattagtggctttatatcattttttaacagtaaatctaaatattttttaaaaatcattttattttcaactaaagtatgagggtacgacaatttagcatgtgaagctgctcttattttcccgtgttcttcaaaaggaatgtgaagaggagtggtattccactcagcatttatccaaggcagtatcaatgattcatcttttagttcatctaataaaatatattcaaaatgcaaatttaaaatagaaagaagtggtttcggagtatttagatgtgagaatccatcagtgggtagaggagagtgaactacagtatgatgaccatcttgaaacaatggataatatactttgtgaattctatatgattcggaggataacgacatatcaaagtaaaacgagaaataggctattcctattaaacaatattgaaatgaatgattgtttgataaaagttgtgacgctattaaataatcatagtatagatcttgcgatggaagtgttaattttattgacttttttgagagaagctccgtacttatgccacaatgcggataagacaaaccggtagcaaacaattcatacgtcggatcactctttgcttttttcatagaaatgtataaagacataagatccggatttatttgatagatagaaattaatttatccttccattcatacatgtattttgttaaattaataatttttgaactttgcacgcccctatttatcaagtcatttgtaagtttttctgcgtcccctctccaaatgactatatattgaaaagaactttctatacgaacaacatctgaaacgtccacaacatgaactattgttttacatttatttttgtctaacgtatttcgaatcctatcccctgataattcatcacttaaaacaatgattttatattgttccttcatgtacatcccctccattatatgtataatatgaaattcatttttaattcgtaacaatcatatacacctgcaatctaacaaaaaaaatagctccaccattaggcgtagctatttttacaattattgcttattcaaattatattcctttatctaactcataaagtttacgatacttttcattttctttcagaagttgtttatgactaccttgcatgacaatttggccacgatcaaggaatataacttcgtctacatgttctattcctacaagatggtgcgtaatccaaataaccgtcttttcttccgttgcagaaaacattgtttcaattaaagacaattctgtttttggatctaaaccgatagtcggttcatcaagtacaataattggtgtttcttgcataagagttctagcaaaagcaaccctttgtctttccccaccagaaaaccgctttcccatttcatgcatttttgtttgtaatccgtctggaagagaagtaacatgtgaagctaattgtgctttctctaaagctttccatatctcttcatccgtcgcctctggtttgccaattcgtacattatttccaattgtcgtatcaaacaaatgcggcttttgatttaatacagaaatatatttagataaaagattcgtatgagctcgttcaccatttagtacaacttggccatttactgggcttaacgcccctgttaacaattttagtaaagtagatttccctgtcccacttctccctaaaatagcaattttcttccctgtttttatttgtaatgatacatcttttaatacaatctcattactatctggataactatacgatacgtgattcagttcaatatctacatgttttggttcaatataatctttctctccatgcaaatccgtttcatcatgtaaaacactatcactttctacgccattaagacgatgggtagattctacatacgacggtattcgatcgatggcatctgcaataggaataagcgcgttcgttacagataaagtcattaatacgaaagctgcgataactgtaggagcaatttgttcacttgccgcttcattcccagtccatatgatcatcgaaataactacaatacctactactaattgaatgatactgtcccgaatatgataccagcgtttcactctcttttcgatttttaacaactgatcattttgttttacatactcattaataaattcatctttacgaccacttgcttgccaatcagataatccaaaaacagcatctgtcagttgttgatacaaacggtttcttccttgctttaaagtaacatgatgtttcttcatcaaaagtaatgatacaaacggaagaagaaaaacgataatagctaacatacaacctacaataagtgcaaaaacaaaatcaaatgcaccgataacaagtacgaagatactataaacaactagcgctaatatgctaggaaatattgtacgtaaatataggttttgcaaatgctctatatcttcggataacactcctaacatatcacccgtttgaaatcgagaacggaaaaataacgcctgtggttctactattctatatagcctcgttctcattttttctaatatacgtagtacgacatcatgtccgactaagcgctctatataatgaaatacagcttgccctatactaaacgctcttgttgcaacaataggaacatatacagccattacattttctggtctaagggcagattttgagattaaataacctgaaataaaaagtaacatcgctcctgaactaactccaagaagaccaaggaaaatagttaaagtcattctacctttattttgttttatataaggtttaacccagttactcatttctctcccctctcttccctatgaaaatgtaatgtctcattctctaaaagttcttcatacgtcccactttctttcatttcccctttatttaaaataagaatatggtccatttgtttcatccaatgtagacggtgggttgctaaaaatactaactttccattaaatagacgtaacatcgcttgctttatttcaaattcggtttcaatatcaagatgtgccgtaggctcatctaataaaatgattggttttttacttaaaagcgcacgcgccatagcaacacgctgttcttgtccgccacttagcatacgtccaccttctccaattctttcgtgcatcccatttggaagtgatgtaacgagtgaacgaaggccgacttcattaataactctttcaacttcttcatctgttgcatttgtttcataaaaacgaatgttatcctttaatgaaagcggaaaaatataaggttgctgcggaatataagcgatatttttttgccaatcttcacgagtagatccatcaacttctacaccatttactaacatctttccactcgaaggagataaaaaacctgctaatacgtcgattaacgtcgatttgcctgcaccactttcaccaataacaccaatagcaccgttaccttcccaagtaaaattaattccttctaatatagccttttcagattcagtattattaactttgatgtcttgtaatttcaagctactagaggcattccatactatatcttcatttaaatctttcttttgtattcctttttgttgttgcaaaatctcttctatttgctccatcgcaatttgtccatctaatgtcgcatgataatttgctcccacttgtttaatcggcagaaaatattccggagctaaaatcaaaattgtaagggctggtaatagtataatcgttccatctattaaacgtatccctaatccaactgccacaaacgcaattgataaactcgtaaagaaatctaatgcaaaagaagaaagaaaagcaactcgcaaagtacgcatcgttgcttttctataccttttacttactttttcaatctttccttcgtgctgttcacttttccctaaatactttaatgtttctaaaccttttaacgtatctacaaaatggttcgaaagtacacgatatatctcgtactgactatctgccattttttgcgctgccaatccgagaagaatcataaatatgatcacgataggaatcgttacaactaaaatgattccagactcaatatctagcgtaaaaacgtatagtacaattagacctggaacgatgctacttctaatcattttaggaatcgttaattcaatatatgttttaaatttctcaatcccttcaattgataaggtaaccagatgaccagttccaacagtttgaacataccttggacctaatgtgaaatatgcctctattagttgttttcttagtaacgaccctgttttttcagcaaaacgttccactaatatttgtgatgttcgaactactatgtgacgcgctgcaaacgcgataccaaaataaacaatttcacttaatattgtttgtactgtctctccatgaaataaaaacgtaatagctcgtgctaaaaagattgtttgcgcaataatactaaaagcttctaaaatactaataatcgttaacgctacatataaaatacggctaccgggataagacggaagtcctctttttcttttcattagtactccaaatcgttgtctgacttaacaggttgtctaaatacataataactccatatttgacttccgataacgaaaggcaaaatagcaatcgcaaagtaagtcataagttttaatgcataagctcctgatgctgcgttgtaaattgtcaaatcattcattgctcctaaagagctaatcataacacgtgggaacataccgataaatacactcgcacttagtaaaatgattgttaaactcgtcataaagaaagcccaaccatctcttcttcttttatttaataaagtggacactaatagtgctacaaaagctccgattggcaccataatccattctgttccatgagcagtgaaaatgtcggttttccataaccccacaccagcaaaaacaagaagtgtaattaatgaaattggtgcaatttttattgcagcaattcgtgcacgttctctcaatttaccagttgtacgtatcgtaagaaattgtaatccgtgaacaatacatagtaggagaaacattactcctccaagtaacgcaaatggatgaagtaattgcaagaatccacctacaacatttttactctcatcaataggtacacctaccataaagtttgcaatcgcaactccccaaaggataggaggtaacatacttccaataaacatcccccaatcccatgcactcttccatttatgattatctattttcgcacgaaatttaaaggaaacacctcttaaaattaaagcaagaagcataaatacaaatggaatataaaaaccactaaataaagttgcataccagtgcggaaatgccgcaaacatggctccaccagcacaaacaagccatacttcattcgcgtgccagaacggtcctattgtatttaagtaaactcgtttttcaaaatcattctttcctaaaaacctcgaaaccattcctaccccaaagtcgaaaccttccagtacgaagaatccaacaaacaagattgcaataactaaaaaccataactcattaagagataacatactcttcctccttatcaaatggatcatggctttgataatcctttttcgttttcttattcttgtggcccttaatggtacgaacaaataagtacacacaaattccacccataattaaatacattgatgtgaatgaaataagtgagaataatacttcaccgaatgttacatttggtgatacagcatcttctgttttcattacaccaaatacaacccaaggttgacgacccatttcagtcataatccaccctactgtattaccgatgaatggaagagaaattgcatacaccattaattttaaataccacgttttttccgctaaacgatcttttcttgataagaaccatccgtaagctcctagaagaagcatgaatgttccactcattaccatcgctctaaaactccaaaacattgtatgcactggaggaatataatctccaggtccatatttttcctcatattgtttttgaatttgattcatcccttcaacttgaccgctaaacttatcatacgataatagacttagcatataagggatttgaatttcaaacgaattttctttcttctctgtatcaattttcgaaaatactgtaaatggtgctggatcctcacttgtattccatagcgcttcagctgccgccatcttcattggatgtgtcttaattaattgttgcgcttgtgcatgaccgaagaataatacaagcgccgttgtaattgttccaacaatgatagaaattcggaaagattttttaaatactacagtttcttgtccttttgtaattttccatgcacttacaccagcaataaagaatgcacctgttgcaattgccgctgtaattgtatgcgggaattgtacccatagttgtgggttttgaataatggctaagaaatcattcatttgcgcacgaccatcagctgccatttcatacccgacaggtgactgcataaatgcacttgcagttaaaatccagaatgctgataacatcgttccaattgaaaggagccaaatacacattaagtgaattcgcttcggtaatttatcctcaccgaatacccataaacccaggaatgtagactcaatgaaaaatgccagtaatccttcaatcgcaagtgatggaccaaatacatcacctacaaaacgtgaatacgttgaccagttcataccaaactgaaattcttgtaaaatacctgttactacacctactgcaaagttaataaggaataattgcgtccaaaactttgccatcttcttatatacttcttgcccttttaccacatacaacgtttgcatgatcgcaataataaaagctaaaccaattgacagcggaacaaaaaagtaatggaaaatcgttgttgatgcgaactgtattcgtgccaattcgagcgtttccatactaaaatcacttccttcatagtttttataataaaagttaattgagcaatcttatcaaactcaattattaagaaatacgaaaagacaaaaacattttgtatgtattgtcgaaaaatatgaagtttcagtttttcaaactattgtaatgctattttttaccttttcactatttctgtagtgttttattcgttaatcgaattgtataatatacctgcatagtaaattcaggttatttttgacgtattattgacatcattttgtctgaaatatgtcttttgtcatttttttgaatcagatttttctcattagcaaaatgtgttttttcaatatacttcttacttttatatctataaaacaatcgtttttctcttcatacacttgactttcacccgaaaaaatgtcctcggaactaccctcgataaacgcttgttttttgtcaagagaaaaatgtatttttaaaattcaaactcgaaataatgttattcaaaaatagaaaataacttccctcttcctcgactaaaagttcatttttttgtcatttttccagaacaaataaaaaaaactgaaagtcgattagactctcagtttttttatttattttgctgtatgttttctaacggctggtaaaatttcagtagcaattaattcaatatttttctcaattttatcaaatggtacaccgccaaaatcaatttgtgccataaagcgttgttggccaaataattcatattggtacagcattttctcaatgatttgttgtgggctaccaaccattaaagcatcacggtaatctattgcatttgtaaattgctgtttcggatacccaccaccgcgcagtgtaagcataccagcattaatgtgagggtaatattcactaagtgcatcttgtgaattttttgccgtataaaataaactcgttgtcgcaactggtaaactagctgaatcaaatccactttgtacagccgcctcgcggtaagcatctactgacactttaaagttaattgctggaccaccaagtgttgttatcatcattggtacacccgcgcgtcctgctttaattgcactagctggtggacctccaaccgcacgccaaattggtaagttattatttttcgctctcggaataaccgatgcatgtgcgagcggtgctctgaactgtccattccatgtgacatgttcctcgttattaatttttaataaaagatccatcttctcttcgaataattcttcataatcattcacgttataaccaagtaaactatatcccccaatacgagatccacgaccagccacaatttctgcacgtccattagaaatcaagtcaattgtagcgaaatcctcatatactcgaactgggtcagatgtacttaatatcgttgctgaacttgcaatttttatatttttcgtagcttgtgcaatagctcctaaaataactgtatgagcttgtgttgtaaaatgcgtttgatgactttcaccgacagcaaacacatcaagccctgcctcatctgctaacttagctgtttcaattagttcgtgaattcttttctctggcgtaattttctccccattatgtggatttaaaacatgatcaccaattgaatataatccaaactcaattccttttcttatatctatacggtatttttccatagttactctcccctttaataaagtagtattagtttttttctaaaaacgttggtaagtcaggtatatctccgtattacctacgccttcacttgattagtcaattgatagtgtaaaaaaaattactcttgcggtaattcttttttttcactatgcttatgaactttcgtcattagctcgtataatattttctgctcttcttcatttaatacatcatcaaaaaacgaagattgaaatgcaagttgctctggcaatgctttctctaaggccgattccccttgctctgtaagactaattgttttcgttttccaatcttgttttcgtacaatatatccttctttctcaagacgagttaacattcgagaaataccaccttgtgtaacagttaccttttcagctaactccatttgtgttagtggctgatacgtacgtatttgcaaaagcacatcaaattgagctgtcgttaaatcaaaacgttttaaaaactcatttgacatttgattactttggttcgtaaatcgtattaaacgtaaccatattaatgatcctatcgtattatcacgcatgttttgtcacttcctagcgttcatcttactatcactttactacgcaagtgataaaaaagcaagaaaaaatgtaataaatatatcgatagagtattgcataaataatgataagtaagaattcatataaacatgaattcttacttatcattattcttaactttgcctttcattcattactatatttaaagctgccatagcttttggccaaccaacgtaaaaagccatatgtgttattaatgcaaccaattcattctccataaccccattttgtttagctagcttcagatgaaattgtaattgttctgtattaccgagactgattagtgctgacacagtacacaagcttctttctcttaatgttaaagtggcatcccgccacacttcctcaaataatatcttttcactataatgagcaaatgcaggtgacatttctctcattttctttttaatatgtacttcaataagttcatttttttctccctttattttcaccatttgtgctattccttgaccaaatgaccagttttcagcagctgtctcatttaatgtaataaaaatatccgaagttttaacatcggaatattccgtaatttttaaggataccgattgatacaaatcttttttctgttgcactgttcttcccggtccacatgtaatagaaacataaatcatattctctgttctcttttctcctctttccaacaaataatatggattatataaaaatttgttttcttggtaaggtaagaacatttgaaaataatcattttcagggatgttaaaatgttcaattaatgaaagatggatacattcacccattttttccaactcttcttcatttaatatgttttcaggataataaatcttcacaaaaggcatagactttcattccttttcttatttttaatatgcaacaaaatttcatcgtgaaatgtgtaaaatctcatatactgtaacacctttattcactgcaatttcaggcttctcctcataaaaattaaacctactatacccccatttatccggattataaacgattacattccctaaacacttttcgttgttttgtacatcttcattcatagtgcttaattgagtcccaatcagtgttttactttgagaaatacttcctgcatattcaacaacatatctacttttcttaaatccatcacttagattaaccactaatggaacacctatatgtatttgttgccatccaaaagattgtaaaatgttatcgtaatacccttcaaagataaatttattcatcccttcatgaccattccaaatatataaaggtgcatagcagttataaaaattcccgtctttctccgtttccgtaattaaataagctttaaaatttagtgcttggaaaccatcagttttataaccattatcctttacccttttcctaataatttccatgtcataatcctttggcaaaatgaccttatattgcattccaatcatgtttatcactcgctttcaatcttatatacattatgataaatcgataagtagctaacgtaaaataggtataaattatgtttggtatcatttataatgatagtgcataaggggctgagatatatggaaataaatgatcttattatattcaaaactgtagccagtgagggttctattagtaaagctgctaaagagttaggttatgttcaaccgaacgtaactgagcgaatcaaaaaattagaacaagaattagaaacgcctttactacatagagataacaaaggcgtttccttattaccttctggtgacattttattagattacacgaataaaatattaactctattagaagaagtaaaagatgaaattaaaacgagtggttcttcttatataatagcgacgtcacaatctattttgacaaattatttaagtaagcgtattgaagaaaacttcagaaattatcaaatatatgtagaaagtagtagtcatttgcaaaaattacttcagcaacaaaaagttgatatggtcataacttatgaggattatcctgacgcatcgtttaaaaaagtgttcacaacctcaatttctgtaggcttattaaaagcgaaagaaaaatgtaccattgattattcaaaagaaattttcttcgttagcaatgacaaaaagtgcccttttaggaataagacgatacaatttctaaaagaaaataatttatctcagcgtcaacttcaacaattagattcttattcgcttatggaagagtttattcaggacggaaaagggatagcctttttgccgattaaaaatgataaattggtaccaattgaagatgttccagttgagaaattagctgttcatttttttgcaaatcaaaactctttcaaacaaatccctgatgaactatttggttaataaaaaaatccctcctttatgaatctaaaagagggattttcatattctatacaattgatttttcacacattttgctccacttctgcacttttctccttcttattccgtttcatattcttcagtcccttaaccgtcccaaccaatcctttcggaaaaacgagtagcacgataatatacaataaacctagaataatcgtccatctttcaaaaatcggatattccgtcgctagttctgataaataatattttagggattcaataatcccagatccagcaatagctccaattaatgttccgactcctccaatcattgtcatcaagagtgcatttagtgtcatttcaattgaaaatacagtcgtattgacaaagcgtaatgtaataacaaataaaccaccgctaattgcagctactattcctgccactacacttgcgattattttataatggaggactttatatccaagtgcttcaacacgttgttcattttgtgaaattgcctttaatactttcccaatagaagactttgtaaaaagacgtaatagaataaaaatgaagcataaacatacaagtgatacataataaaaagtaaaacgatcacggaatatttctggtaccccaaatgtaaaaccatctcctccgtgagtgagcccacgccatttttcagcaaggacgaaaaacaactgtgaaatagcaagtgttaacattgcataaaaatgacttttcaatcgtaaagaaagcaaaccaattatataactaacgattgctgaaacgataattgcagctactattccaattaaaaagttcgttattgatacgccttgtcgatcaaataaaagcgctaccccatatgctcctatcccaaagaacatacaatgaccgaacgatacaattcctgtatacccaagcaatacatcaaaactcattgcaaaaatagcaaagatgaagatttgagtgaacaaaattaacaggctccgtgaatcatttacgaacggaaatacacttaaacaaatgagcatacatactccgaagtatactttaattcggtccgatgtgttgttcaccatttcaccccttttcaccaacaagtccagttggcttcactattaagaaaaatagtaacattaacatattaattgcaagtgataaatctggtataaaatacgctgtaaaagcaccagctaatccgacaattaaagaagcaatagctgaaccttgtacgcttcctaatccaccgataattactactataaaagctaaaattgcatactgcatgcccatctcggcgaaaataacgcctgaatacggtgctaataagaatcctcccaaagctgccatccctgctcctaataaaaagacgaaagaaaatatcgcttttacattaataccaagcgcttgaaccatttctttatccattacacctgcacggatcataagacctatcttcgtctttttgagtaatagtagtagtgcgatgtaaataattatcccaatcaaaataacaaatagacgatatttaattaatataatacctccgaatgtaaaacttccttgtaaccataacggtaattttgcactaatagggtttggcccccaaaatattttaatacactcactaagaacgagcattcctccaagcgtaacgagcagctgtcgaacatgatttccatataccggtctaataagaaacctttctaaaataaatcctaggaacattcccatggctactgctccaactaaagctaatatataacttcctgtcatattaaataaccaaacacctgtaaatgctccccatgcaaataaaccaccgtgtgcaaagtttaaaacgctcattagaccgaaaataagtgaaagacctgatgctaacaaaaaaatgagcatccctgttgaaatcccatttacaaataaattgattaacacatccatccttttcacctcggattcatgttaagagattcctaaatatttatgacacatttccttatccttttttaattcattcataaaaccgttatgaacaattcgtccgttatccataatgtaaaaataatcaccaatttgactagccatcataaaattttgctcaacaagtaaaactgttgttttctctttcatcttcaaaatagctaccattaatttctccaccattatcggggatagccctttgctcggctcatcaataagtaataatccatcactattaataaacgctcttgaaatagccaacatttgcttttgccctccgctcaagagcccacttttcttattccaaaactgctttaaatccggaaatagttccagcatccactctattttcccttctacttccacaccttttcccctagcaagagcgaatgtttcttctactgtcaaatcatgaaaaataccttgattttctggtacataccctattcctttccttgaaattaaatgtgtaggtaatccacttacttttgcactatcataataaatttcaccatctgcaatgcggtgaaaccccataactgaacgtaatgtcgttgttttccctgccccgtttctaccaaacagtacagtaattgtccctttctcaacagcaagagatactccttgcaaaatatgaaactgatctaaatacgtttctatattattcacttgtaatagtgccactatataatccccctaaataagcactttgtacacgctcatctttcataatttcttctggcaatccttcagccaataactctccatgaaataaaacgataagatgatctgacaaacctagtatcatatccattttgtgttcgataagtacaattgtgctctctggatgtttcttaatattttcaatcacttgtaatatagcagggacctcctcaaccgaaatacctgccgtcggctcatcaagtaataacacatccgtttttaaagccaataacatcgcaagttctagctttcttttctctccatgtgccaaatctttcgctaatacgttctctttctcgtgaagtaatactgtttttaagaaacgtctcgcctctccaacttgttgctttaattttgctgaactcgggaaaaaactatagtaatcttgtacgaatgattgaacacttaaacggacattttcaagtaccgttaattctgggaatatgtttgtaagctgaaaagagcgaccgattcctaagcgtgttcgatctgaaatcgatagttttgtaatatcttgccctttaaaatacacttcacctgttgtaggtgaaatctgtccacttagtaaattaaataatgttgtcttccccgcaccatttggcccgataatagaaatgagctttcctttttggacagttaaatttacatctttaataacttgatgttcaccaaaagatacactaagatttttcgtctctagcaaatgtgtcacgaaatccctccctttaaagccgtgagtatgaaggaaatatgtataaagagggtcccccctctttatacaaaaacaacagaaaattcagtctatttattttgaactggtggttctgtttctttcatcgttaattctcgctctaacactggcaccggataatcaacaccatcttgctttttcaatgtgatagaatacagcgtctgcatcgcttggtggtccttctctctaaacttcatctttcctttcggtgtatcaaattccattccttccattttcttaatcaaggtatctacatctgtatcaccttttgttttctttaaggcttctacaatagaaattgctgctgacattcctcccgctgtaaacaaatctggcactacaccattaaaacgttttttatgctcttcaactagccaatcattcactttattttttggaagtgtgtgataatatacagaaaaaccttgcatacctactaatgcatccattgtttttaatgctggtatatctggcgcacctgtagaaattttaataccttgcgcttccacattcatatctttcaactgtttccaaggtgaatttgcccctgcccaaacaataaataaataatctggttttgaactaatgatattttgaatattcgctgtaaaatctgttgaatttgtatccgcgtattgctcattcacaatgctcgcacctaattttttcgcacccgctttaaatgcagcaatcccttcacgaccaaaagcgttatctggggcaaatgtcgcaatctttacaccttttttcgcaattgccgctgctcctgcaatcgcatcttgtgaggaacttcttccagttctaaaaatatatttattccagttcttcccggtaatactatccgcaactgccggttctacaaccataatcttttcatattccccggccagtggtaaaaccgctaacgtatcacttgaactagacgatccaactaaaaaatcaactttctcttcttctaataacttcgtagcttttttaactgctacatcagctttcgtttctgtatcttctacaacaaacttaatctttttcccatctactttcccagttccaccagttgcatagtctaaccctaattcaaatccgttcactgtttgttttccatacgattctagcggtcctgttaaagaagcaagaactcctaccttaatcgttttttcatcctctgtacttgttttctttcctgaacaagctgccgttattaataacgaacctaaaacacaaccagtaaacattgtctttagccacttacgttttttcatcgacattgtgatcctccccatactttactttctgatagaatcaaacacgccaaaatcccctgtccgtaatcatgactaactaattcgatagataatggaaaactcttgtagtaccctctacattcggcacaaatatataatcaccttcctatgtaatggaaacggacatacaatcaatatatattctgtaatccaattgaaaatactgtttcatttcagtaatgatcatacaaaaagactaacttattttttaagttagtcttttcaccttaattagagttaagttctactttctctaacccttcagccaattgtttcttatctagtccttctcctattactactaagtttgtcgggaaaccgaagtcttgttctaataaagttggtactccgaacgaatattggaataggtgagggtatttatctccacggaatttcacaaaacctttcactcgataaatactatctggtaaattcgaaagccattcatataatttgtcttgatcaatcggtttcgtaaattgatatgtcatcgtttgtatatgtaaatgctgtttgacatgtagtgtctcatgttcctcatcatttggaaattctgcttcctctatatcttttaaagatatattgcaatactttgtctcatacattttcgcatgatcatttattgcctttacttcttcaaatactgtgttcttatcttcatctgttagtaaatctgctttattaacaagaatgtgactaccaaatttaagttgctcatgcaatagctgttgtacatttgcacttaatatacttcggtttaaccaccttactgcatctaaaacgactacaattgatttcacttccagaaaaggagctaaaattggcgagacacacgcgtctaacacttcaattggatgcgcaacacctgtcgtttctatataaattacatctggtctttcttgttggtataacgaatgtaattgtatttcaagctcttcttttaatgtacaacaaatacatcctttaagaagttctcttaaaacattctcttttccaataatatctgtatctaccgagtattcaccaatttcattcattaatactgcaacttttctattcttctttttctctgctaacaataaattttgtaataatgttgattttccactacctaaaaaaccacctaatatatgaatctccactttattcattcaaccgaccatccatttctttacttcaaatgtattcaaagcgtaataattacgatttatatttatcattttattaaaagaatgaacatttgtaaatataagagattcactgttcatttacttcatatgcaactctaactccagactcaattgccccttgcatccatccatgtgttaatgtcgtatgctctcctgcaaaatgtacttttccagatggtggtgtaatatacggaaataactcgagctcttggcctggttcgaaagctgtaaatgcaccgcaagaatacggatttttactccagctaaaagatgttccagtgacaaactcactatagacgatgtcaccgtatatttccgctaaattttttaatgcgtaacgaatacgatctctttgcgggagactatcccatgttaacgcctcatctgcccacgtataacttgctataacgatagctggtcctggagtatgaatgccataactcggatagtatgtaaaccgtatcggtaaatcagtaatagatttacctccacactgtcccgctttctcccaaaatctacttttaaactctattgcaattttagttgcagcaatataatttaattcacgaattgctctttttttaaaataagagaataaatagtatggctgaacttctacaaatcttaacgctgaaaatggaattgtaataatagcaaaatcacttgttattgtaaattgctctaacgtttgttcatgatttccttgtaacattactttattatcttcttgtataattttatcaaccttatactgcattaaaatatgttcccttaattgtggtaagaatgcattcgataacttatccattccaccagttatttcataatatttcgttgttgaagtaaagaaaatcatttcacgtaatacttcaattaaggacattcccatataagcttccatatcaagaagtaccccaatcatatctattgcaccatctgaataatactccattaaaaatgaaccaagcgaatacgttttatactttttttcaacgataagccagtttttatcaggatccttcttaatataatttagtattggttctaatacctcaatcattagctcttctgccgtttttcctctttctttatccaaaaccggatattcaagtacacttggatcattttcaaacacattcaatctcgtttgaatgttattcgtataaatgatatctgcaaaagttttatttataaaaaggtttaaaggtagtttaaatttatgaatatacgctaaggttaacttatgggtgtcagggattctcatcggtcccgcattaaaatataaacccacactaaatggttcccgaatcgtatacactctgccacctattctgttatttgcttctataatcgttacttcgtgcccagcctcttttaataaagaacctgcaactaatccagaaatccctgcacctgcaatcgtaatccgttttgggttattctttttaacaagccctgcatgaataatatgaagcatttcttccattgttaatgggttccccataccatttccccttttacaaaggattttactgaattatattcggttcactgaattcctatgttttgttcgcagatttgcacggatacattttcaaatacttgaatatcttttataaaatgtaataaactagatatgactctatagaagtaagacgtattatcttacataacaaaaccaatgaaattgcgaggaattttgaaatgaaaaaaggtattaaccgtgttgtattagtaggaacaggagcagttggatgtagttatgcttactgcatgattaaccaagccgtagctgaagaatttgttttagtcgatgtaaatgaagcaaaagctgaaggggaagcaatggatttaagtcatgctgttccattcgccccagctccaactagagtatggaaaggcagctacgaagattgtaaagatgctgaccttgtagttattacagctggattaccacaaaagccaggcgaaacacgtttagatttagttgagaaaaacgccaaaatctttaaacaaatcgttcgcagtattatggatagcggatttgatggcatcttcttaatcgcaacaaaccctgtagatattttaacttatgtaacttggaaagaatctggtttaccgaaagaacgtgtaatcggttctggtacaacgcttgattctgctcgtttccgctatatgttaggtgagtacttcgatattggtccacacaacattcacgcttatattatcggagaacacggcgatactgaacttccagtttggagccatgtttccgttggtatccaaaaactacaaacactgcttgaaaaagacaacacgtataatcaagaagatttagacaaaattttcataaacgtccgtgatgcagcttaccatattattgagcgtaaaggcgcaacttattatggtatcggtatgtcacttctacgtgttacaaaagcaattttaaacgacgaaaatagtgtattaactgtatcagcttacttagaaggtcaatacggtcaaaaagatgtttatatcggggtacctgctgttttaaatcgcggcggtgttcgtgaaattttagaggttgaattaagtgaagatgaagaattaaaattcgaccactctgttcaagtattgaaagaaacaatggctccggttctttaattaagataaaaagcaatccaatttattttggattgctttttattttcattatctcctatgactttttagtgattttctatcatttcttattttttagtcgcatcctcattatttatatcaagtacatctaataaaaagataaagattggtatcccgataataagcccccatattccgaggaaatgctctgagaagataagaatcataaatgtgtagaatattggtaaatttgtttttgcagacataaacttcggatttaaaaaataactttcaagagcatggattactgttatgaatacgagtatgtatactacgtacataactccgcctacgttgtaagcaatgatacaaagtggaaacaaagaaataatcacacctgcaacaggaatcaaccctagtaagaaaatcataacagctaatacaagtagctgtggaaatcctaaaacgattaatgcaatgacagtaagaatacaatttacaacggcaattaaaaactgagcctcaattacttttccgaacgatcttgcaaatctttcaccaaaatatgcaatttcctcataaaagatttttaacttactatctttaaacttagatgtaaatgtaataatacgctctttttctaataagaaaaataagcttaaaattagagataataatatttgtaaacttaccttccctatatttgctattgattgatagatgacatctacaccttgttctatatattttgatacttccatcccattaattgtcgaaagtgcatatttaacgatttcattatcaggtggattttgaaaaaatagtttaaactgataaattaattgtgaaatttgtatcgtcagcacaggtaaatatttatataacgttgtgcctataaaggaaaccaatattatatataaacatgcaataacaattttccggtttactttcaattttcttgaaataaaacgttgaaatcgatccattaaaaacgtcagtataaacgtaattaatattaaattaatcatactttttaatgcgtataatacaagcgctactattattaaaacgagaaaccgttgaaaccctctacttcgaaaaaaactctttacttcattcattaagaattaacctcccccttcaatggatggaaattgaatatattacattttatgaactcctatagacaatctttcttactaattgggaagaatccttttttcttttttattgtcggattttttcatctaatacttttctaaaaactactttatcaattctatctttatctttcgttttttctgtcatagtatctttttcgtcataacctaccattacgattacaggaatactatataagttcgatttcttatttaacgctctctctttgtctaactttcgcgccacttccatcgcattaggattaatctctgtaacagcatttaatgctattccattttttcatgttgttctctccaatctacaagttgctcactagtaaattttcagattgaaaaaagagagttatcttcttaactctctctagacaaaatgctaaatgatacaattaattattccaatcaaatcattgctttttttccattcgcttcgctaacaattccttcacttggttataggttaaccctgaatttttatttaaacgctttacttcctcaacatcagtacctaccactgtatattttttctcatcattcatttttctaattcccttctcaccgtattatttcttatatttcttccctaaatacgcataaattaacaccactacaaaaaaggaagctgtttttaagcacagcttccttctcgttacatattgtatttcttaataaaatttcactacatcttcagtaggtaagaacgttctttctgctggttgttcgtttggttcaccaaatggcatttgacctactaagctccactctgccggaatgttccaagtttctttcacttcagcatctacgattgggttgtaatgttgtaatgacgctccaattccttcagaagataatagcatccacacagtatgttgtaacatcgcatttccttgatgagaccagaatgggaactgatctttatataatggggcattttcttgcattttttctacagttgcttgatcttcaaagaatagaactgttcctacacctgcatggaagccttttagtctttctacagtcgcttcaaagttttctgctggtacgcgggctcttagtgtttctttaacgatatcccaaaacttttcatgctctccatccattaatacaaccatacgaccactttgcatattgaaagatgttggtgcgtgtaaagctgtttttaacacttcttcaattctttctttcgtaattgcatcgttttttgctactttacgaattgaacggcggttcacgattgcttcttttaagtttgttgtagttgctgacattttaattcctccaaatgtttgttttataatttattttgttatttcataacaagcgaattagcaatatccatcggtattacattgcataccttcaaatgaatttgttttatccttttcaatttctttatcaatgaccctttctagtgtttctttactagcaagcccttgaatgacttcatctccaatcatgacagttggaacagccataatattcgcttcatcatatgcgtgttgaattgcttcttgatgcttttctttatatttacgagttactaaagcatctttaaattccgcctcaggaagtcctacttctaccgctaattttgttaacacatcaatatcttcaatgttttgctcttcttggaaaaatgctgtgaatacgcggtgatgatactcattacctagtccacgttctttcgcaaattgacatccttcgaaagctaaatgtgtatatggatgcggtgaaacacgtggcaagcgcatatcaattcctaacttcttcgctgtcggaagaatgaaagcatcccatgaacctaatttttctggttcattccatggatctatttttgaatatggacttggacgtaattcaaatggcatccattcaatctctacatctttctctttcgctacctcatctaatggaccttttgctaaaaaacaaaacggacatataaaatctgagtatactttcatttttacagtcataacttttacaccttacctttattgttgtaatcaaatcggttacattaatgacaaaaaaatataaatatgatttaagcattcattttttcttgcaaagtttcaaacaactgccccattgtaatatttctcaaaacttcttccatcgcggattgtgcttgaattaaaataatttctaacaccgcttgaatattcgcaccaattggacaatctggattcggtttctcgtgaatatgaaatagcttgtcttcttcgactacgttcactgcatgatacacatctaacaatgtgatttcatataaatcctttagtaatcccgcgccaccgggtccacgatttacgtaaacaaagccagcttgtttcaagtacgacatgattttacgaatgactactggatttgtattaacactctcagccatatagtctgaagtacaaagtgaagatggattgtttttcaaaatagataaaatatgaacagctatggaaaagcggctactaattttcatcgtaatcaccacctcgatgtaatcattatagttacaactaaaaaataagtcaatccttttcatagattttttataagtaaattaaaaagtgtcccattatgatatatgagacacctctttttattctgcaaatagcgattgaaattcttcaataaatagctgcacagcgattgaagaatcctttaatgaaggaacagctaaagcaatttctctccatacttgtggttccaattctctcgtttgcacattttttggtaaattcgttaaagataattcagctaatattgcaatgcccaatccttcttgaatcatatttaaagctgtagtaactgtcgaaattacatattcagcccgaagtggtacgtttgcttgtttaaacatatcaataatgggtggttcgtatccacccttacataatatgatcggttcattctctaaatcacaaattgtaagagcgtccttcttacagagaggatgatcctctcttaagatagcaaccattttccccttcgttaatggaacaatctccatatctttattaggcaaaataacaatccctatatcaataaccctcgatactaaccaatcttcaacttctttaatcgtcccttcacaaagaactacttctaagttcggatacttttccttaaaaaggtttatcattttgggtaagaaatgtgcagaagcgctcggaaaactcccaattcgaatcgtcccaacttcgtgtcctttctccatcgcaacttcttgttcaatcttcgctacaccgttcaaaatctctctaatatgtacaagaatcctatttcctacatccgtaacgagtagcccttttcgtttatcacgtataagaatcgtaactcctaactctgactcaatacttgaaatcgcatgactaacagctggctgcgtcatatttaacaccctggcagccttcgtaaaactacctaaatcaacagtttttattaatacttgcagttgtgtaatggtcataactaatcacttatactcctcataaaaaagattcattttatttattacagtcgatatcatatcatagtgaaatgaataacaacaaggaggtctttcagtgacacagctttctcgaactaagacggccatcatccttacctttctcgttttcatgtggggaatcaattggcctttatcaaagtttgccctgcattatacaccacctgttttatttgcaggcgttcgaactttaattggaggattcattttacttctgttcgcattaccgaaatacaaagagttacatttaaaaaaaacgtggcatttatacgttatttcttccttacttaacatcattatattttacggattacaaactgtcggccttcaatatatgcctgctgggttattttccgccattgtatttctacaaccagttttactcggtattttctcgtggatatggcttgaagaatcaatgtacggcttgaaaattttcgggcttgttctcggatttattggtgtaggcgttattagctcaagcagtttaacaggacatatttctgttattggaatccttctcgcgttaggatgcgctattggctgggcacttggcacagtattcattaagaagactggtcaccgtgttaatgccatttggatggtaacacttcagcttattattggtggtctttgcttaattggatttggttcagagtttgaaagctggtctagtatcgcttggagtatgccatttgttagcgtacttctctttatttcattctttgttattgcaatggggtggcttgcatacttcacacttgttggagctggtgaagcaagtaaagttggggcttatacattcctcattccactaatagctattattgtaagttcaattttcttacatgaggctattaccattagcttattcatcggactattatttattgttgtgagtatttgttttgtaaatataaaaccgaaaacacttgctgtaaggcagcaagttgaattgaaataaacgtaagaaagagcctactgttgtaggctctttcttacgtcttactttttacgacgtactacaaaaacacacgcacttaccgacgatactatggcaaaaatagataagacaattgctatcaattgcatattactagtaccttcatttttttctacactagacacttcaccatgttctcctgttaatgacgtaccttttgcaattgtagtaagtgaatgcggtttttcagctttttcatcacctgtccattcaacaatttctccatctttatattgttgatatgcgtcccaagctattttttgctctttatccggatttttagcgacgaaagtaaatcgctggaactgacctgttaaaattccttctcctgtcgcttcccatactacagttttaacttttccggcattatctttttgctcctcaactttccatcctggcactggttcatactgctggaactctactccagacggtattttcagtgtaacttttgtcgttgctacatttttttcaactggtacttttatcgtataagtctcccaagaaccaacgtcagaagttgctggttttacagtgacgtgcgcactaacaggtaacgaaaacattcccattgcaataattgttgcgatcattgttgttcctaatttttttatacgtttcattttctatttactccttttcatctataacatctgtttatcctgctactcgctagcagcatgattggtaaaattttatctgccacctacaataaatttaaaatctgtatcgaaactatcaagagattttgttaatccatgaacatgtatattccagtttcctgtcatattaatatacataccttctgcttcatattctcctggtgaaactactgaaactttaaatgaaccttttcccatgttcatatctaatgattgagtcgtcaatatcatttgttccatatcagtaacaggctgtcccttttcgtcctttagtgtaatatggaatttattttgtcctaccttattcggacttacatttagcgtaagttcatatccattatctaattgcttactctctgtaaatggtccagtaggaggcatcggtggtgtttgtacgtttgtcataaaagctacgattacgaaaatgataattccaatgacaaactctactttcaccgtagctcctaatccttgctgcgctcttattctccctttcacataatgaataattcccaatatccccatgaaaataaataatagtatctttgctaataaagccaatccatacttcgtatcaaataacgagtggattgttggaataaaaaatgtactattaaaaaggcctgttattaaaatcacaatgacagcacctgttgcccacggtgaaaaacgcttaatcatatcccaatacatatgccacttattatcctctttacataaaagaagaataatagatgataaaccaccaacccataatgaagctgctaataaatgtagaaaatccataacgacagcaatgtctttaaactttaaaccgtatgcgtgactattaaaggccttcataacaagtagccctataaacaatagtattggaatactccatactttaaacgacgaaaacttctcatgcttcaccgcaaaatacgtaacaattataagcgtactaatgagaaccatttgagtaatccatacataaccaaaaacagaaagctgtaatgtttcttttaatagtaaaggattgaatgcttctagccatgaaacatcagcatttattttcgcttgcagtggtagattgaataacaagctaatcaatatcccaaataaagagatccatattatgttcttactccttgatcgaaccgaggttgcattgcctttatacataataagattaaagaatagcactcctataaatagtgagaaacttgtatataaaattccacgttccataatcatatcgatttgtgggacgtagcccatctcttccacttgtatatcgtctgtttccgcttccgctaatccaacccggaacgggataactccttgaattggatgtccatcagctgaaatcactttccactgaatagagtaaagaccatttttgagattgtcttttaatccagcttctaatagctttttattttttttatcaatatgagcatcttttaaatcgatccttttacctgatgtatctctcacgtacaatgtattaaaacttgaaacttgtatgtcctcatcgaattcgatttttacaacagatggtgctttcttcaatgtttcattttcagtagggtttgatttcacaacgtacgcatgagcagatgcactttgcggtatcaatatgataagcacacacacaagtaatagccatgtccctaatcttctcattactttcacactcatttcacttctttcttcctcattgctctattttcattactttaacttccgaagtttaattctcgggcgaaatattaacctgattaaatataaacttctataaagtataactcttatttctcttccacctctaaacttctaatataatagtaactatcactatagatacaacttacatttttaaagccgattgttattatatcataaaatatatttatgtaagttatcaaagaagaaaagttatcgtgaatcatttgtgaaaaaaatgtgaaatacataaataaaaaggtattacgttattacgtaacacctttaaaaaaatatccctcttctatttctcttccggataatcacaatactcgataatcgttccttctgtatccgctgggttaagataaattaaccttctaccgtgcttattaatgcgtagtgtatgctctaatgtccgaataccttgttcttttaactcttctagagccacatctaaatcatcgacacgatacgcaacgtgatgaacacctttacctttttgtttaataaaacgggcaattggagatgttgtattatttgtcggtgcaagtaattcaattctatctccagccacttcaagaatggctacttcactttccacaccaggagcttcacttacgtaacgatctattaaagttcctagtaacacattttcataaaaacgtatcgtactatctatatctcgaactgcgattccgatatgatcaattgtttttttcattttatttcccctactactttattttttctcattattaatagtaacaaaaaaagctatagaaacaagtctataactttttttatttaacctattttcttatccgctctagttgctggttgaacttggtttttcacttttaaaatgctaataccatatccgataaatccaccgataatcgctgggaagatccagcctaatcctacttcctgcatcggaaggaatttagtgaacacttggcttactacttcaatgttaactccagctgcacttaatccatcaaataagctgatgataaatgttacgattaagcttacttgataaacttcagctcttcctttaaataatgaatggaagaatgttaagaaaatcaatacgattgctagtggataaattgctgttaatactggaacagaaactgcgatcaattgtgttaatcctacgtttgcaacaattgcactaaatacacatagcgtaattgcaattgctttgtaaggaacatttgggaataacttatggaagaatgaagaacatgctgatacaagtcccacactagttgttaaacaagctactgtaatcattaatcctaataatactccgccatatgatccgaaatagtagttagaaactttcgctaatacttctccgccgttctctaaatgtccaagctttgcaacacttgaagcacccatataagaaagtgctgtatagataattgctaaaatagatgctgcaataattgtcgcttttgcacaaacgaccataatttgtgttttcgttttcgcacctttttctttaatagcattgataatgataatcccgaatacaaatgatgctagcgtatccatcgttaagtatccttcttggaatcctttaaagaatgcatgtgatgtataagcttccactggtgcttgcatatctccaatcggatgtataaaagcaacgattactaaaataccgatgaaagtcaacttaattggcgttaagatttttccaacaatatcgacaattttcgcgggatttagcgaaaaaaaacaagtgatactaaagaatataattgtgaaaagaattaaaggtgtagaacctactccttctggcataaacggcttaagaccaatttcataagaaacatttcctgttcttggtattgcaaataacggaccaatcgctaagtataaaactgttgtaaacacaatcccaaacactgggtgagcacgactagctaatgactgcaaatcatctttacctgaaaaaccaaatgctagtacacctagtaatggtaatccaacaccagttactaaaaatccagcgttagcaatccatacattctctccagctgattgaccaagcatcgctggaaaaattaaatttcccgctccaaaaaatagtgcaaataacattaatccaataactactatgaacgaaaacggtactttattcgccataatataacccccattcaagtttccttatctcattttccaattttaactaattgaattttctgaatatttaatttaagtatcaactattcttgaattcattatagtttgctatataatattttgcaatactattttcgaacttttcttttattttataaatatacattttttaacatgaaaaatagactaaaaaaccaacatggtcatccatgttggtttttccatttactatcatgaattaaaattttgctgctacttttttaacgttttctagaccttcttcaacaatttgttgtgaacgatctggatattgattgtgtccttcaattacaactgtctctggatttgtaattccccagaatccaagtacagttgttacgtaattaactgccatttccataggagccatttgttctgaagagtaatctgaaccacgagcacctaacacaactactttcttaccaccaactaaaccttctgggccatttgctgtatatttaaacgtttttccagcttgagataagtatgaaatatatgtgattaatggtgctggtactgtaaagttccataatgggaatgcaaatacaaccttatcagcttctaaaaactgatttaaatattgatctactgtagcaactgccttctcctcttcagctgttaactccataccttggctacgtttatatccacctgaaatcgcgatatttccgtaataaggaagatctaatgcaaataaatctaattccgtaatttctgtatttggatttgcttctttataagtacttacaaatgtttcatacatttttgaactaactgcttgctccgctggacgatcgtttgcttttacaaataatacttttgacatttttttattcccctctacattcttattttcttcttttttaccaaataatgagctaaatagtcccattttcttcacctaatctttcttttcatattcattattcatcatcataaaaattcttattctaagaaaaagttccaatagataccttaagttacgccgttgcaactttttgttatttaattaccttatgtaagtgattgtaatatagtcacttactttagtcaagtaacttttaataaaaaataaaatctcgacttaaaaatattaagcgagatacaattgaacaccaaatacatctttattacttgtataataaacttagagaggaaaattcatatatagaaaggatttattcatgagcactatagaaaagattcaaacttttattattctttttgctgttacatgcggcatcgtactcggacaatttaatatgatacatacgtattcagacaaatttattgtccccttcttatttttcatgctatatggattattcctcagcatcccattaaaagaaataaaaaaaggatttcgcaatttaaaatttgctggaacaagtcttactattaacttcttatggacacctttactcgcttgggggttaggggcactatttctttccgatcatccagcactttgggttggatttataatgttaatggttactccatgtacagattggtacttaatctttactgaaatagcgaaaggtaatgtagcactttctactgcaattttacctgtaaatttaattttgcaagtactgctccttcccatttatttatttttatttgctggtgtcatgaaaactgtagcggtttctgttttagtagaaagtattgttatcgtaatcgtcttaccatttatacttgcacacgctacaaaattcattatgaataaaatgaaaaaagctgaacctctcgagaataaactcattccgttttttagctctgctcaaattgtatttttaagtttagcaatagtagcgatgtttgcatcacaaggtaaatatttactacaaaatatgaatgttgttttattattactcgttcctgttctattgttcttcatcatcaattttttactaggacaatttatcgggcgcatgatgcatttatcttacaaagatacagtaagtctaagcttaacaacgttagcaagaaactcacctgttgcactcgctatcgctgtaaccgcttttccagacgaacctcttatcgcacttgcactcgttattggaccattgattgagttaccggtactagcttgtgtgtcacaagttttgttgcttattaagaaaaaacggcaatacgcataataaaaaacgtcccattttgggacgttttttattatggaaaaattacatacaacacttatttcttatttatcattacaaatgaaattaccgaaactacaaacataataatacccattataaatcgatgggctctaaaaatgttatagagaattaacttttcgttacattaacagatcctttctaattaaaaatgataggaaacgtaaatataacgaaagctgcccaaagtccgtatattggcaaatacttcgtaatggcatcttgaatagctgtcggtcctgatttgttttgcaagaaacgcatataggaaaacataatccaaattagatttgcccagatcagtatatttacacctaaaacagctagtctattaggtgtagtcccgtaagatgaaagtctaaatacgatggctgacaatgcgacagtgtcaataataagcgccagaacaattaaggaaacatttatataatctgaaatgttctttttctcgtccgagtcactctcaacgatagaaaatatagtaacagccaatacaccaagcagtattccgttgaatgccattaggaaattacgatccaagaacgggtttttcccgaccaaaattatcgttataagataaataaacaatgtgaccaggacaagcggactaaagattttagatatgtatggtgtaatatttttagcaagcttaagattcattgatactaagtatgcagccacaatagcgagagccgctgctccaaataaaacaacattactaaaatagaattctcctatatctaagtcaacaaagctaaataaacgcatggtgaatattgctagtatcattccgctcactgccatgctcccgtagagaagacaatattctaaattaaatttaatataggctaatcttgtactgccttttgaatattcatttcctgtaaatgcaagccctactaagacccataaaaatataggaagatgtaaataagcaagtatggtactgtctttataatttattggcaatgtattaagatacaccccggaaactaggaataacgctataagggaataaataatactttttttcggcttattattgtaaacaaaataagcagcaataaagggaattacaccaaaagccaagtttattggagcaattgcttcctgctcaacaaagtggaaaataatcctggtgcttatgccggccaaaatagctaaaaggcccatgaataagaaacctttttgaaacaaagatgttttttctttatttactttctccttgaaatgcaacctttcataccaagcacctagaatttgagaatcagggttttggtcccatgcttgtgagaatgcttttttaaaagctttcggatcttttctatacatcttctccaactcatgggggttatccatatgtttaacaatcaaattgttaatattcatagttatacctcctctaattttaaaaataaggttgttaccttttaacaaaagcacctcactcatttattatgattttgattttaatacaaaatttatcgttttacaataaaaaattattatttaaagcatttttttatcgttaaatttcatttcaaagaaaaacaaaagagcatgacaattttatgtcatgctcttttaacaaattaattctcaaatacaaaattaatcttattatctttccactctaatttcgcatcaaacgttttctcgccctttttaaagcctttaattaaatcagtcttttcaccttttaagagctttgtcatattcttttgcgaaattgttttacttaatatcttctttgaaatggtgaaatcacattgcgttgtattatagttagaacaaccgtaaaacgttgacttatcaattacatcgccatcacattttttacagctaccaacctttttacccgttgtaaatttcgatccttttcgttcaatcgattcaacatgtagtcccgtgaaatcccacttctcagacatttccactgcgtcttcaataattttagctgatagctttttcgtctgttccataaatgtagctggtgaagctgtaccttcaccaatttccgcaagacgttgttcccatttcgcagtcatttccggtgaagctagtattttgtcaccaattgcggtaattaatacttttcctttatcagtcgcatacacttggtttttctttacatctatatatttacggtctttcagcatcgtaataatacccgcgcgggtcgcttccgtacctaaaccttctgttttcttcaataccttctctagctcttcattctctaaatacttaccggctgttttcattaacgtaataagttgtccttctgtataacgcttcggtggctgtgtttttccttctttcactttcacctttacaacttttccttcttcaccttcagctacaattggaagaatggtttcgtcatctttatcgtcttggaaaataactttacgccaaccttcttgaatttgctgttttccttttgaaatgaattcagcacgttcatctacaagcgttacaatcgttgtatagtcaaagattgcaacttcataatgagctgcaataagccttcttacgatcatatcgtatattttcttttcatcacctgatagtctgcttgggtttgtaacttgctctgtcggaataatcgcgtagtgatctgttactttcttttcatttacataacgcttattgttcataatggattcaaccggagccggtaataaacctttatattcatcaaactgacttaacttctgtaaaatatcagggaaagtcgctgcttctccttgagtaacatagttagaatctgaacgtggataagaaacaatccctttttgatagagtgcttgcgttatatcaagcgtctttttcggtgaaaacttaaaggctttatttgccgttgcttgcagtgatgataagttgaataaaagcggcggctgaaactctttacgctccgttttcatttccttcacaacagccggtttcccttggcaaaatgccgcaattttattcgccatatcagggtcttttaagcgggattcattatccttctcccatttcccgtcatatttctttccttctatattaaaggttgcaaacacttcccagaaaggctctgacttaaagttttcaatttctttctcacgctttacaatcaatgctaacgttggtgtttggacacgaccagcagaaaatacatcattcattccttttttctttaacaaaatactaaacacacgtgatgcattcatgccaacaacccagtcagcacaagatcttgtgtatgcttcgtaatacgtattaattgtatctgattcatcaagtaaatttttaaacccttgataaatagcttgcttcgttaaagacgaaatccatagacgcttcataggcttttgcacattacaaagattaataatatttcgtacgattagttccccttcacgcccagcatcgcctgcgtgaataatttctgttacctgtggattatgtaacagctgtttcacaacgttaaattgcttatactttgactttgttacttcaaattgaaaacgctctggaatcatcggtaatgtattaagtgaccattttttccactctgcgtgataatgctctggattacataactgcgtcaaatgaccaattgcccatgtacagtacgctccatttggaaataactcattcgcttctacctctaaatatccatctttccggcgatatttaaactgtgaaacaagagccaacccttgatctggtttctcggcaataattaatttcattttataactccctatctgtattccagtgttactttcattgtctatatgtttagaagcgatgataaaacaacaatcttatttatcattcgcggtttgtctcgcaaatgggagacctataatattatacgcttattctttatggcttcacaatagaaactcataatataacaatttctttcacatgcttacaattaaaaaagacgccctaaaaaatcaagcgttcctttgcttacatctatgaaattgtgcagataatatgcagatataaattatcataagtacacatatgatgaaatgaacgataggacaaggaggtatcataatgtttgcttatacgttaactaccttaacactttgctgtacctcaattcttattgtatccaatatttctaaacgtaaggttaccctaatggagtatatggtatttattatgtcttttagtatgagtatcggtttaagtattggtttttatttaggcattctctttaagggggaattactatattctactttacttgctattttaattagtggttttatcggttttttagtgggtctacgttttcacctatatactgctttagaaggaatgttctctggattaatggcaagtatgatgggagcaatgattacagaaatgttaaacgctcaacaagctcatagtatattgttcattagccttttacttactataacgattactatgtcctgtgtgattcaattgttatcggagaacttttctacttttatccaacgtcgttttttgttattcctttcaattagtgtagtaattatcgttgccgtattcgcgacattcccagatcatactcctgcaccttcaccttcacctgggcataatcaacatatacattagtacttgcaacaaaaatgaataagcagctatccataggataactgcttcctattattctggcttattaggaatgttttggtttggaacatagtcagatttataatctgtatagttcacttccgttaccatccctgctgaagcatgatgtaggtcgtgacagtggaacatccactcaccgggattgtctgctacaaaggctacttcatattcttctcctggttttaagttcaatgtatcttttacaattggagaaccttctatcggttttccatctttactcaacacctggaagaagtgaccatgtaaatgcattgggtgatcatccattttagaacgatttaccaatttcacttttactaaatcaccctttttcacttgaattgggtcaatatccggaaatacctttccgttaattgtatataccatttcattttcattcatttgcgtatttaagtccatattatatgtggcagtatactcttgatttaacgtgaaactacctaattttttagcaccatatttcgtcatatctaatttcgctaattttcccttttcatctgctttatctttcatctctttgctgccatcatactcaataacagctttcattccttttgcacctttattttttgaatggtcctcaacataccacttcccaggattattagcagtaaattcaatatcataacgttcacccggtgcgattgaaattactttatcctttataacttttggatcgtttattggttgaccatctgtcgcaattacttttatatcatgaccgtgaacatgtatatcatgtgatagataaccagcattaacaagtcgaagacgaactttatctcccttattcactttcaatggcactactaaatcaccgctttttccattgattgtgaataaatcatacatactcatatcatgaccttccatcttcatatttccatggtccattcctgccatattgccagagtctttttgatcactgcccatgtccataccagaatgatccatgccgttcttatcatcattctttttcgtattttcatcacctttagatttattacctatttgcccttttgtcatttcttttaactgctttttaatttcttctttatctgtaacccattcatccaacagtaatgtgtaatctttatcatatttttcctttgtatcctctacaatgagcgctccatacaaacctctatctaattgatttacagaatcttgatgcgagtgataccagtacgttcctggtacgttcgcttcaaattcgtaagtgaaactttttcctggttcaactgcatcttgtgtcacgcccggaattccatccatgttatttgggacaggatatccatgccaatgaatagatactggtgcagataattcattttttaatgtcactttcaccttttcaccttttttcacccgaatttctggaccaggagatgagccattaaatgtccagactggaacaataacaccgttacttaatttttgcttttcttctttcgctattaaagtaacttctggccctttttcaaccttcaatggtgttgtagctgtttcagtctgtagtgttttgttatcattcatatttttatgatcatttgttgtatttgtcgtcacagaacaggcagcaattaaaaatattacagagacagtaacggctgctaatacaaatcgcttcatggacaatccctccttattctttttcaaaatcattatagaagttgattttcaagaaaataaggagatgtaattagatcttacgtaagctaattggaaaattactaaaagcggagacattacaagagacgaatattttagtaatacaaaatgctttccttgtagcgactatattagccgttctcgtatttgttttgacgttatttcttaagaaacaataacactgctattattaaataagaaaaatgtagctaaaatgctcttcacaaaagaacttagatttttgtataataagaactaatgttcctcacagacaatggactcaaattacacaaatatatcaaatagaagaggattgatatacgatgaaaattgatagaccaaaaatttcaccagagttatcttcaaagaattttcaagatattttttatgaagaagatccaacattggaagtgtgtgaaattatagactccactttcgaaaatgaatctgtagatagagtgcggttatatgatgcggtgataaaaaactgtaagtttactaatacagactttagcaatattgatattacagatgtttgttttgaaaactgtgatttatcaaatgttaatttaagcaattcttctgttcacagagtcgaatttaaaaacagtaaattaatcggagtaaatttcacaggatctagcttaggaaatgttaaatttgagaattcaattttgaatttagcggcatttggaaattctaaactagaaaaaatcatcttcaatgaaacttcattaaataatgcagatttttttgactgtaaacttaaaaaagttgaattccaattatgtagtcttgatgaagctaattttgatcagacatcactgaaggggatagatattagttcttctacctttgatacacttacagtttcagtgaacgatttaagaggatgtaaagtatcgacatatcaagctgttcagtttgctactttattaggattaataattaaagattagtatttcgaagaaaagaaccctatcccgaatcatggattttttaattgtccacgattcgagataaagttcaaataaattagtgatgactcttttattatttaactacagcttggtttccttttacatgttcattatttacactcataaattcttcaatttcttcaacttccctaatgatatcttttgacaagttttcatacccgtctttcgttacaagaatgtcatcttcaatacgaattccaattgattctccttcaatataaagaccaggttcaattgttataaccataccttcttctaacactctatctttatatgttcctacatcatgtgtatctaaaccaaggaaatggctgacaccatgataatagtattttgataactcttcatcttcttgaattaaaccaattgctttacactcttctgccagtaccttttttgtatgctcatttaatgcagcgaactttaatcctggcttaataatctctgttgtttcttttaatgcttttaatacaatattataaatttgtttttggcgactagagaatgttccatttgctgggaatgtataactaatatcagcgttatagtagtctttttgagcacctaaatctagtaatactaagtcaccattttgaatttgtgcatcattatcttcataatgaagaactgtagcatttttcccactcgccaaaattgtattgaacgcatggtacttaattccagatgacttcagtgtaaaatcaaattgtgcttctaattcatactccatcatgcctgcttttgcatgcttaagtacgttgtaaataccgtctttcgttatagcaatcgcttctttaataatttcaatttcttcctctgttttaaatactcgtaattcacaaatgttcggatatacattaccaattgttacgtgtgggtatttttctcttacatgtttagcaaatgctaatgtttttgtctccgtaccattccaatcacgacgttctatatctaaatatagatgcttcgcattttctgtaaaaagtatatttgacattgtcttttcaaagctatctaaatatataactttctttatacctgaaattttctctgcttcttcgttagaaactgttttaccgacccatttttccattactggatctgccttttcaatgaaaagtgtttcttcaacactacttccaacctttttcagcataaaaataacatttggttcatcgattcccgttaagtagtaaaaattacgattcggtacaaatttataatgtgcatcagctgacatatgcggtgcttgtcccgcaaataaaatcgtaatagatccctctggtaatgtgtttgctaatcgttctctattttgagcaaaaaatgttgatttcatgataatccccctagcgttttatgtataattgtgaaactaattattcaatacacttcattctattattgttataatttttcgtcaatttttaactaaattttagatagtattgacacaggcaactaaacaagttacaataactataaattagtaagttgctaatttaaatttaaataagaggtgaacaaaatgcaaaacattttattccgtattaacgaattgtcaaaaaaagaaaaagcgaatggattaacagttgatgaaaaacaagaacaacaaatgttgcgccaaaactatacacaaacatttcgtggaagcttagattccattttattaaacacaaaaattgttgatcaaaatggtcttaacgttacacctgctgcattacaagatgctcaaatacgtttaaaattaagcaaatgagttccgagctaaagaattctaataaaacataaaaagagctggatttcctatatagaaattccagctctttttattttcttttttaatttagtaaacgagcgatacatcgcaattctccacgacacaatcatcgcaaatgcaagtaagaaaaacattccacttaactccgctaaatcaatcgattgacttaaatatgatttcaacgctactcgtacagctaataatccgactaaaataaatataaatgcttttgacggtttcatatatatttgttcgtctcttatttcaaacttcgttgtttttataagaaatacagagaaaataagccctgcaataattgcttctattatttctaacgacgttaatcggaattccggtaaaaagtacatcattgctccagtactcataaaaattggcggcaatataattttctttttcgttaccggttttttcgctgctttaaagcgcagaaacatgacaccaacagccatacaaaccgctaaaatacttgataaaagtgctatcatactcttcccactcctatctatttaaaagactttttgagcaaaatcataaaccaaacgagcccgatacttataataacatgacctaatccagccatatggcttaaaccgtaaaagtcagttccatttacttgtagaagacctctccatagcattgtaacaatagtaaagattactcctacattataaacaacaaaccatgcacaaaagctctttgtttcttgtacatgaaacactttacataaagctaaagcaattaaaaagaatacaaaaccgagcactaatacatgtgtatgcactaattgcaacattgtggatcctttaattccttgtgctttcgaatactctcttgcaaatacacctgataataaaccaataattaagtaaataaatgccgcattatataatttcttcattctattcctcctgttgtaaactttctatattcgctgcaattattttaagcaaagtttatgaacggagtatgaacaaaatattacattcaatttttgaaaataaaaaagccattccacaaataataattgtagaatggcttttcaatttattttaaatcttctattgagaaagcacctggcagtaactgctcaacagtcacttctttttcatcaccttttacattcgttaataatacaggcattttcgggtcacagaattcagcaattacttgtctacacgcaccacatggtgaaatcggtccatcagtttctcctgtaataactaagtaactaaaatcgcgctcaccttctgatactgctttaaatattgctgttctttctgcacagttacataaaccgtaagaagcattttctatattacaaccagtatagattttcccttctttcgtaactaacgctgcgccaacaggaaatttagaatacggaatatacgctttcgataacatcttgtttgcttcttcaatatattttttcttacccatattatttccccctcaaagtaaacgaaatgatgattagtcagtaataactgtatgaactaatttaggagccactgctgtttcagcgatagagatgttctcataaatttttgcttttacatcttctacattttcacgatttgcgtagattgttacgaatggctcgccttcttttactgcatcgccaacttttttacgtaacattaatcctactgctaaatcgatttcatcttccttcgttgcacgacctgcaccaagtaacatagctgcaataccaatctcatctgcaacaatgttagaaataacacctgaagtttttgcaggtacatcaattacatacttcgcctgtggcattttttctggattgtctacaattgagctatctccgccttgattgcttaagaactctttaaacttctcagttgcttttccgtttttcataacttcaattagcatttcacgagcttcttctaacgtatttgcttttttcgcaagtacgaccatttggctacctaatacaagtactaattctgttaaatcttctggaccttcaccttttaacgtatcaatcgcttcttttacttctagagcgttaccaatcgcaaaaccaagcggttgtgacatgtctgaaataacagccatagtttgacgtcctacattatttccgatacgtaccattgcatgtgctaattcttttgcatcttcttctgttttcataaatgcaccagcacctgtttttacatcaagtacgattgcgtcagcacctgctgcaatttttttactcataattgaacttgcgattaaaggaattgagttaaccgttcctgttacatcgcgtaatgcataaatctttttatctgcaggtgttaagtttcctgtttgtccaataacagctactttgtcacggtttacaatatcaatgaactgctctttcgtaatttcaacgtggaatccttctaccgcttctaatttatcaattgttccgcctgtatgtcctaaaccacgaccagacatttttgctactggtacatctaaagcagcaactaatggtcctaatactaaagttgttgtatcaccaacaccgccagttgaatgtttgtctactttaattccttcaattgctgataagtcgatcgtttcaccagactcaaccatcgccatcgttaaatctgcacgttcgcgatctgtcatatctttaaagaagattgccattgcaagcgcactcacttgataatcaggaatacttccgtctgtatatccattaataaagaatttgatttcttcagtcgttaattctttgccgtcacgtttttttgcaataatatctaccattctcattacaatcaccattcctttttatatgatacgaatctattaaaataataagccaacgattgttgctgataagaaacttactaatgttgcaccgaatagtaatttcaaaccaaatcttgcgactacattcccttgcttttcatttaagctcttaaccgcccctgcaataatcccaattgaagagaagtttgcaaatgaaactaagaatacagatataatcgctgtcgttctatctgagaaattaaagtttccttgtgctaaatctgtcatagcgacaaattcattcgatactaattttgttgccataatatttccggcattaactgcttcatgccaaggtacacccataataaatgcaaatggtgcaaatacataaccaagaatttcttggaatgaaataccgattacacctttaaatactgcattaatgaatgcgataagagcaacgaaaccgactaacatagctgctactgtaatcgcaactttaaatccatcaataatgtattcccctaatacttcaaagaaagtctttttctcttcttcttgtacttctaacatatcttcttcctcagtaacttcatacgggttaatgatagaagcaatgatgaagccaccgaataagttaagcactaaagcggttacaacatattgcggttttaataacaccatatatgatccgacgatagacattgaaacggtagacattgcagatgcacataatgtatacattcttttctctggcaataaccctaattgtttcttaactgaaataaacacttcagattgtcctaaaatcgcagaagcaactgcattatatgattctagtttccccattccatttactttacttaatgctagaccgatagatttcacaataataggtaatactttaatgtgttgcaaaatacctattaaagctgatataaatacgattggcattaatacacttaaaaagaacgaaaactctttttgatttactaatccaccaaatacgaaattcacaccatcagcggcatattttaataactctccaaaaccatctgctattccgctaattaatatattccctacacttgtatttaataataaaaaccccaaaataaattgtaatataaccatcgttatgattgggcgatatttgactttctttctattattactagcaagccaagcgatacctaaaatcaatacgaggccaaaaataccaattaagtatttcataagccgtctcctcccattcgtatccgcttacatttttttcaattattaaagcaatagatacactttactttgtgtatctattgctcttcacttcattaatgattagtagttatctgtagcaccttttgcatcatttaatacgattgcaacactagcacttgctccaacgcgagaagctccagcagctaccattttgtctgcatcttcacgtgtacgaacaccgccagatgcttttacaccaacgtttggtcctactgttttacgcattaatgcgatatcttcagcagttgctccgccagttgagaatccagttgaagtttttacgaagtcagcaccagcttttactgataattcacaagcgcgtactttctcttcatctgttaataggcaagtttcaatgattacttttacaagagcttttccttttgctgcttgtactacttcataaatgtctttttcaacaagttcgttgtcaccatcttttaaagcgcctacgttgattaccatatcaacttcagttgcaccttttgcaatagcatcttttgtttcaaatgcttttgtttcagtcgtgcttgctcctaatgggaaaccgattacagtacaaacgtctacatcatgtccagctagttcatcagccgctaattttacccatgttgggttaatacaaacagaagcgaatttatattcctttgcttcttcgattactttcataacatcttctttagtagtattagcttttaaaattgtatggtcaattaactttgcaatgttcattatcttcactcctcatatcttttaacaacttcattctaactcttagttgaacaaatgtaaatacacttttgaaattttgttcattctttttaaaaggaatcatcttgtagtaaataaagcgcattctaacaaagaacatttcagatatataatcaaaatttttatgttaacaatggtagtatgtatctccatatccataattatttttaaaaaggcaatttgtgttcaaaaaaactcctatcattcatacataacaaaataaaaggcattctcaaaattaacatcttgagaacgccttttatttctaatctttttgataatgtaataattctttcgctgtatgctgatcgataattaatacatttgcatacccgccacgtaacgcaccatcaattgcttttatttttctattaccacctgcaactaaaatagagcgtttctttaatttcagttcctctaactcaattccaattgtacgctgattaatctcttcgctactaatatttccgtctccatcaaagaaacgtgaacaaatgtcaccgaccgattgttttttgagtaaacttgtttcatccttatcgaaataacctaatcggaataatagcgcttcgtctcgcactgttcctacagtgaaaactgcaatattcgcttgtttccccatttcaataatgtgatgaatatgtcgatcctgctctactaattcttttgtcactgcattatcaaatataactggaagaggtagatttcttggcgtcgtttgaaaagcatctgcaaataaagctatcgtctcattcgcatatgtatttacacttgaatgactaataccaccttttagctggacaacctccaccccttttacatgttgcggtacgatttttctagcgatttcatacatagtcatgccccagcttacaccaacaatatcaccgtttttaaccgtcttttccatatactcagcagcatatttacttatatactctgtaatcgttgcatattccggcactggagaaaatacaacatgtgcctctaacaagttgtacttttctttcagtaaattcccgacgttatctaaatcagcaaatggatcggcgatgctaatttgaacaaaccctttttctttcgcgtactttaacaatctagaaatcgtcggtcttgaaatatttaatttgttagcaatttcttgctgactataatctgattgataatataatcttgcaacttcaacgcttaattgttgtttatctttttccatagtaactcattacaaatcccttcctgtatttccctttcgttacaagcattatacagctttatgcaaaaaaattcgactaccgaattttatctatctgaacttctactacacttaatatataatgaaaacttattgtgtagatttacaaactcaatatagatacgcttgaaacatgtaaatcaattaacatttaattcacattttttctgtagtaacgataacaaagccgttcaataagaaacatgaaacatcatctaaaaactattcaaataccccttataaacagaagttactatttataaggggtatttactcaatttaattttataaaaattggatggaaacaatgcaagttctcacttatttagaataagtgaaaagatgatgttttatttgttcaataaaataatgatggtgtatattatcgttagatactcgacttgccataatagccccctccattgaagaggcaagaaaggaagcgagtgatataacctctatatcttctttaaattcttgtttctctattccttcttttatgagagaagccattaacattactgtatcatcataaccttttgctgctgctttttgtaattctggaaatactccagtactttcaatggcactattaagtaatggacagcctccagcaataggaggattattagctgcatcttgatatacaaggaaaattgcaaggattttatcaattgctgtctttttattttccattgctttatgaaaatgactccacataatctcaccacttttgtcgtaggcagcaaggacaatttcttctttacttttgaatctacgataaatagatcctttaggtagttcagtagctgtcattatatcctggatggatgtgcgagttatcccattagtattaaataaatataaagatgtttcaataattttttctttaaccttatcaactttagtcatgctttgtaatcctcctaatgaaaaccatcctaatattctaggtaatgtttaccctctattttcttaatttttttgtaagtataaataagtttggaacagaaatatcttatcaatccctatcttatggaaacctcaaacaatacagtttgaaaagaagttaatcaaattgtattacctacataaattaagtgaattttccgtcaaaacaacatgaccaattgtttaattcagtcatattatacaactaattttatctaaaatcgtagaggtgtaaaaatatatagttaattttaatgtatagacatatgattattatatataatttttatcaatatgtttagctaaagtgtttgaactactcccactttcacttcattctataaaagattaaccattaatgattactggaattaaattgtaacaaagcaactgaaatataaatatatttgcttttttccattttgattttgttaatactttataaaaagggtttaaaaaactagaaacttgtagtatcattagatttcgattcagaccgaaccgtccggtttataatcttatataaatatatttagaaggagagcgttatgcagaaagaaaaatcaaaaattataggtaatttaattatgggggcaatacagtgaactttataaaaatgaataaaaaagaaatcattatgctaataatctttacactgtttgtaccatttcaaattggcttgtacatactatttggcatatcacttttagctaatgtcaatttagttgaatcagaatttgttcttagtgccatcggttttactgtacctgctattgtaggaatcatttactttaggaaagaaattattgaaagttttacttattttaaagagaagacaattttgaaaatagtaagtattcctatggtagttttatttacgttaattgtggaacagtgtgttatgcattttctagcaactggtcaaccagagaaccaagagcagctccttgaaacgggtgcagaggtacctcttgtatttacattgcttgtatttggtattctgggtccaatacttgaagaaattgtgtttcgccacatattaataaatcgtttttcttaccatattggtactgctattgcatctatcatttcgattatgatttttacacttcttcatacgaaccaactttcggatattgctatttatttacctggatcgttgatacttactgcggcttatcttatttctaaaagatccattgcatatgttatagcgatacatatgttaaacaattgccttgctttcattctgtaagaaactagacttgtttctgatgccaaaaatattctatgtttctatcaagcatttttggtaccagaactactttttctatgacataagaaagctaatcaaaaattataaaatattaggagagtgtcagtcatgattgtaacaacaacttctggaattcaaggtaaagagattattgagtatattgatattgtaaatggtgaagctattatgggtgcaaatattgtccgcgatgtattcgcttccgttcgtgatgttgtcggtggccgtgttggtgcttatgaaagtaaactaaaagacgctcgtgatattgcaatgggcgaaatgaaagaacttgcaaaagaaaagggtgcgaacgctatcgttggtattgacgtagattacgaagttgttcgtgatggaatgttaatggttgctgtcagtggtacagctgtacgtatataagtaaataaaaaaacggttcctcttggaatttatactttgaggggaaatcctgattctgttgcagattttaaagaataaaacgagaaataatcaacttttttatttctcgttttatctacatatttatttttggaaaaacaatctaactccaaatactaataatacggcgcctgtaataccctctattgtacggttcactctttcttttcttaaaaaagttcttaattgacgtatgagtgagatgtaaagtaaataccatattgctgtcaaagtcgtaaatgtgagtcctaacaaaagaaattggaagaaatgattttgattactcacaataaattggggtaaaaaactaaggaaaaatacagcggtttttggatttaaaattgccgtagtaaatccttgtctaaagcttttaattgccccaatatccttagagtccatttctgctgaacctgacatatcttcttttttatgtaaggcacttttaattgactttacagctaaataaattaaataaacagccccagcatattttataaatgtaaataacatagcaaatttcattaagatagcagaaagtcctaacgtagccattattgtatgaatcatcattccagatatcgttcctaaaacagtctttatcccgccatttttaccatgcgagatagtattttttgtaactagtgcaaaaccaggaccaggcatcattatgattaacattgctgtaaggataaataatagataattttccatgttgtagtatttcctctccaatttttagttttgcttacagtatagcttttttcattaaaacattacatataaaagacttgatcagaaatgtatttaggttattcgtatcaatttgattaactattacccaatagccacattgataaaacacatgacaaacttatatataattgcaagctcaactctcacaaaaaaacaggatgaaaaataaacagcagaactagtccactgtttactttgccacaccttcatgtaatttttctgtataatcttttacatctttccagctatctttcgctgtatgtaaatcttcttttataaacgtaaactcttccggactaattccttttacgttttgtaataaattattatactttgcacctactgtataccattgatttgatatgttttgtagtgctgtaattgctgcatcaattgtttctgtcatgtttgttgttttattttttacatcagtcaaaattacgacttctgcttgtgctcctgaaattctatcttttaaattggcgatttctctttctgcatttgcgatatcttttttcgcaaccgcaatcatcggcccgccagcaagacatgttattagagctacgcaaagtacgccaccagcaatgaccatatcattactctttttaatcgaatcgttatatgtatttatttgttgctctagagctggaataccagcattcgtacttgccaatatcgctgttaactgatttgtatcctctttgaaactatttgtatctttcgccattctatcgcgaaaagctttcaaatttcctaataatccatctacctcattttgattctttacaatatccgcatacaacttttctaaatccgcttttaattttccactatccttttgatcaatcgctattaacatgtcattataatacgattgaaaagtattattgtaatttataatattttgatctgttttcataatttgaggcttcatattatttaaccaatatgctgcattaatttttgcatctctttgatgctgaatcatactccctttaaattcactattaatcgaacttattttacttaaatccgtctcttgttgattttgaattaattttgcatatgaatccattgcaaatatgcttgatgtcgtttgtgccattacatcttggaatcctgctggtccaagagaatagtttttcacattttcttgtagcaccgttacattttgttctgctgcaaaaggatgtaaaggaaatgcgttactcgttgccaccccagcaatcattaccgctaaaagacattttttataaaatcgtttctgcatatttttcacctattctctttataaggatatcaaaagctcctgctcacaactgaacaggagcttcaaatcattcatcaacacttaacgccctaacgattcgtattcgattatgcttttttcgtatctactactttaatatcttcagcataaatcttttctgcatagtctttaatgtttttccagctatctttcgcaatgtttaaatcttctttaatgaaaacaagatcgtttggactaattgaatccacattttgaagtaaagaattgtattttgatcccattgtataccattggtttgaaatgttttgcaacgctgtaattgcagtatcaatcgtatttgttaaatactcagtttgtgttttaatgttcgttaacccagctacttctaattgagcagttgtaatttgtccagttattttttgaatttcagcttgtgcattgtcaagttctttcttcgctaatacgataccagctgtaccaccgcctacagctgctgcaccacctgcaattaatgcgactcctagcggtgttcctgcgcccgtagcaataactactgcaccaccaataattgcaattggtcctagagctgtcgcaacagatgaaccgataataattgcattatatttactaattgcttcattgtacgttgtaatttgattttgcagaagtggaatccctgcatcttgactagctaatatagatgtaatttgatttgcatcacccttgaagttttgcgtatccgacgtcattttatttcggaattttttcaagtcttctactaactgatccacttgcgctttattttcattaatactacttgataatctagttaggcctttcgtaagagtcgctttatcttttgcatctaccgcagcaactaaagtatcataatagttttggaattttgtattgtagttaatgatgttttgattcgttgaaataagctgtggctttaatacatctaaccattgcttcgcatttcctctagctgtatcttggtgctgaatcacttttccttttaaagctgcatcaacagtcgatacatttccaaagttaacattaccttgtttaataattgttaaagcatacagatccattactaaagcatttgaacctgttctttccattgcatctttcaaaccttctggtcctaatgaatattcttcatagttattataagcttttgctaccgcatgaactggagcttgtttcactgtactttcagctgcatacgtatgagccggcataatatttcctgctgcaaatactgccataagtgctgatagagccattactttatatggtttttttgtcatttttcttctctccctatatcgctaattatttttctatttaatgtacttcaacgtttgtaacgtaatcttcaaattgatttgtttgcttattcatttcatcacttacttttttaatttgattaaaatgtttttgaagtaaactactgtctgtatacgtgccttcttcaacatttgtttgaatttgaatcatattattatttaaaactttccaatccgttaataacgtttctaaagttgtaatttgacgatcaattaattctgtaaagctatttacttgatcttcaacgaatgtaatttgagtcgcctctgcttcagtttgtgataacttttgaataagtggcaataactctttttgcttttgctgaatgcgaaaagctgcttctctcgtttgactatctgcagcatttacaatttcattacttaaagtaccgatagaaacaaaatcgattgttttcgtttgtgcagtttgatttgtgattgtaaatacttgtttaccgatattaatagaacctttaattatttcttgaggtctattcaaaatagtagttagttcagcttgaatttccccttgaattcttttaatatcttctcttaatttcacaatatctccacttgatccttgcagtgtttttattgcttcatcggctttaattgataagttgttactatctttgtctaatactgttttaaatcgatttaactctaataaatcttgctccatactctcttggatgctctgtacttgcaattgtaattttccatatgcactcataaaatctgtttttgcttgctgatcttcatttacatttcctgctagttcatagagcttactataataactattgaatctagtgctgtatctcatcatctcttgatttaagtcaattagcttcggattatattcatcaatccactctcgtacattcgcctttgcaaacttttgatgattcgttaagctactcatcgcatttaccttaatgtctggctgttgcaaaataattaatccgtatgcttgaataagcggtgattgtgatcctaacattctaattgaattggataatgtatttggagcaattacattttgcgcatatactgttttcacttccgtttgcccctccttagcgtaagcgcttacaggaatgaagcaactcgtagataccgctgtaaccaataaccctgtaattaaagtctttttcactttaactcctcctatgtattagcaactattactatcgcattttattattctattttcttgcccataatttgagatggttaaaatagagaacgttctcaacgtgatctatgtatgaaccacctctctcgtattgctacagtacttacttatcgtcacaaaacatttcattatttttcatatgtgtttagtatgaataatattgtataaattttctatttcatcgaaattcccacattcacacagtgaatatattacataaaaatattattcattttaaactaaacaacatacgtaaatatgaaatttcattttgttttcatataagttttgtactgtaaggtcatttaaacacagctgtttatatatcgtaaagaagtattttcattccctttattttcaagctttcatgtccttatttcaaaatataatccgattcactttatcgattgaaatatctacatatcacaacagaaaacactactttcaaataaccaatgaagttatattagtataatttttaaccccatatgcaattatgcatagcatatacacaaaaaggatagcttcattttcgcgaagctatccttaaaaaattttcttattttttcaaatgatatggaactgtcgtaataacaacatttcttttataaagtaaatacgcacgtataagtaaactggattgattatgaagaatgttatgccaaccttttttcggaatgaactgtggtataacgaccgtaacacggtaattcgattcacttgccttatattgcactgtatcgataaacttcgttagcggctgaataatacttctataatgagaatgtaatgtaacaagccttacttcaggttgccacttcttccatttctcctcaaatttcttttcctcttctctgtcaaaagcaacatatactgcgataacttgatctgccgaaagcgatttcgcatagttcaatgaattttctactacatgcgtcatacctgctacaggaacgacaattacattcccctcaattggaataagaggctcgcaagtttttaaacttaattgatcacccactgcatcataatgcttcttaattcgatggaataagaagataataactggtaagaaaataagaatcgaccaaacttgtgcaaatttagttaaaaagaacatgctcattacgataaaactaataactgcaccaattaaattaaccgttaatcttaaagcccatccttcaggcttttcgcgaagccattttaataccatccctgtttgagaaagtgtaaatggaataaatacacctactgcatatagtggaattaaatgttctgtttgcccttggaaagctacaattaaaataatcgaagcaactccaagtataataataccgtttgagtaacctaggcggtctcctctaatcgtaaacattctcggtatgaatttatcttttgcaaggttaaccgctaataaaggaaatgcagaataacctgtattagcagcaagaattaatattaaagctgttgtaccttgtatgaaatagtacatgaaattacgtccaaatgtttgttcagcaatttgagaaacaactgttacttctttactcggagtcactccgtaataataagctaaaaatacaattcctgaaaataacacagcaagtaatgcacccattgcaagcaatgtttttgcagcattgtttggcgcaggatctttaaagttcggaattgcatttgaaattgcttcaacacctgttaaagcagaactacctgatgcaaatgctcttagtaataaaaataaactaatccctgcaactggtgtaccaattggcgcatgtaaagtgggtgaaacatgaccagttaaaatattatatatgcccacaccaattaatataaatagtgctaaaacgaataaataaacaggatatgctaaaacggaagctgattccgttactccccttaaatttaatatcgtaattaatataacaaatataaccgcaataattacgttgtgtgcatgtaagctaggaaacgcagacgtaattgcatctgtaccagcagacacacttaccgcaacagttaaaatatagtcaactaataaagatcctccagcaattaagcctggattcatccctaaattttcttttgatacaacatacgctcccccgccatgcggataagcaaaaataatttgacgataagataaaataagggctgtcaataatactaataccccaacagcgatcggaatggaataccaataagcgatcgctccaacacctgctaaagcaattaaaatttgctctggaccgtaagcaactgatgacaatgcgtcagaagataaaatagctaaagctttcgttttattaagcttttgttctccaagctccgttgattttaacggtcttccaattaaaaatcttttaatagatgaaaccaatgctgtccactctccaataattttgtacgaacttttctgcttgttgcagccagtaaactatttactcagaaaacaaaaaatgtctacaagccatagcgaaatagacttgtagacattattttttttgtcgcacaagctccaccttccttctcaatataacgcttacgaggttagctgtcggattcgggcctatgagtagccctaccttttttaaggattcaccccatcggattatgtactaatccgtaaaaacgggtcccccgtaccatgcggtttcagcgatttagaaaattgaaactgtggattataatactcctttattttcaaaaagtaaacaaaaatttttaataagaaaaaaattaaaatgattgtgcataatccactgagaaatatacataatgaatactaaaaaatccgcaaaggagacccctatgtctaaagaaaagaagcctattttttccgattcatatttagatgcagtagcaaatgaaattaatcagttatatggtaaacgtgaacaggaaataaatttgacagatagaacgaaaagaaataaataatttgtcatacaaaaaaataaaaaagatagcaatacacttatatattgctatcttttttattttttcatacatctaattctattacagatctgttaaaggtcatctcttcatacacctttaaattttgatatatagtgcctaataatggtgccgctatagaaaattgctctgctacatccagtaaatatccttgcaagtgcttcccttcaataaacgaacccttctccatatcacgttgcatcgatgacttcatatcatacgaaattttatcaattgttttcatatgttcctgggcaatattaacctttattggagctcctaatactttcataatttgtacagattcctcaaatacattacggataaaatcacggccgccttcactttcacgaattggtccaattggtgcacgcattaacgttgtcacaccggacattacagtaataaataaatatttatgccacatatcttgcgtaatattttcacttaaaacaaaactagatttcgtacctgcaaatgctttagaaatatgctttactctctctgaattttgagacttaatttctccaaacacaagtctgttggcagcgctagtttgtacaatttctccttgatcgtttaacgtcgtctcgataaagcataaaccgccaagtactttttcttcgccgaattctttttgtaatagcgataaatgagcgataccatttaacaatggaatgattacagtattttcgccaacaaacggcttcaaatcttgaattgcctcgtttaagtgatacgcttttgttgaaaataaaatgacatcaaatggagaagttctctcttctttcgttattaaattcggttggaaagagaaatccccgttaacacttcggattacaagtcctctttcctctaattgttttttccgtttactacgaacaagaaatgtaacatcttctcccttttcgactaatctgccaccaaaaaatcctccgactccaccagcgcctaatactaaaatccgcatacagcatcccccttttcaaaatacaattttataacttttagtatacataacattatacatgtcctctgctaaataagctgaattttcactctcaatcgagtataaaacagtggttattttcaaataaatttgggcatgttgtttctatagcatatatggaaaggaaacaatgtagatggaggcaatacaagcaattgaggaaaaagatgtagcaacagctatatttcaatttatattcccgttttcgtttaaagctggatatgaacaaaatatgttccctttcttacaaaaaaacgatttccgtccttttcggctcgatcatctctatgatgaaaatacatattatggggagtttaaagtttcacatcaaaatatggaagcatactatctttcatttacaaataaaattctctttcctcactcagagcatcaaaagggcttgcaacgttattcaaaggaccttaacttaactggacatttaacaacaaaccttatttcaatcccattcaagatacactctattgatgtaacactttgtccttatgaacttggcttcttaacaattcgaacagaagtaaacactgctccaagcatgactttatctgaagcaatcgaattcgctgctcgcttccgtgtacttgaaactaaaaatgatacaaatgagactatttgtattggatgtaacggaaaaaagtattcccaagttgaaaaattcatttttggttatttatttcatggcgtaactgatttctttgaaaagaagagattaagaagttcatactttcaaaccttccctttcttcgaagaccaaagaatgtacgtccaaactttattgtcactaaaagaaggtatggaacttaatgaagtggatgtttatcgtacttctagtctttccggattaacaagtgatggtaagccatatgtgagtgcaaataaccttccttacattcatgactatttaaaaaaacacgcttaccagagatgggctccaaatcgttatttcataatggaagaacatatttttacatgtgtaacaaatgaaggagaacgcgaaatcgctaaacttgctagtcaaatgtacggagaattttattacgctttattattaaacctattccataaaattgttttattaaaaatggcaaacgcctatgctgagctaaacattgaacaagatactaatgaaatagagaaattaatttattcgatcaattcgttcactgctaattatttttctttagaattagtatcccaatcacaaagtgaagatattttctttcgtttaagaaaactttttaatattgaggttctatactcgaacgcgaaacaaaatcttgatagtttgtttaaatatcaagaaaatgtcgcctctaaaaaagatagcctcttattattaattttaacgctctactctgtagtgggccaaatgttagggtttactatgattgaccttttaagaaacaccgattcaaacaaaatatcgtcacctcttgaatttttcgctctattaattgcgattagcggcattgtcatttcacttattttaggagctcaaagtttataccaatggggtttacagcataaacgaagaaaagcttgggtaaaacaaactgtactttctgccgttaaagagaaagaagataaaaattaaagaaggttattttcaaattcttggcgcgctgcagtaagtgaaatctttatcagcgattttccgattatatcggcgcaactcgaaatatatcagcgatttttaagatatatcagcgcaactcaaaatatatcagcgatttttaagatatatcagcgcaactcaaaatatatcagcgatttttaagatatatcagcgcaactcaaaatatatcagcgatttttaagatatatcagcgcaactcaaaatatatcagcgatttttaagatatatcagcgcaactcaaaatatatcagcgatttttttaatatatcgacttaccgacaaaaaccgacaaatgacagaaccgtataataaaaaaagggtgctccaaaattaaacttggagtaccccttttactataagaattcagtttacttccctgcttcgatttgctctaatgcagcagctacttgctcttccgttaattcatgttgtattacgtagcggttacgtggacttacacgacattcattagaacatgcacgtaaatatttcgcttcgttttcttcagaacataaaattttcttattacattctggatttgaacagtttacatagcgctcacaaggttcacctgtaaagtggtctttaccaacgataacatgttctttttggtttactggtacagcgatacgctcatcgaacacgtaacattgtccatcccaaagctcaccttgtacttctgggtcttttccgtacgttacaattccgccgtgaagctgacttacatcttcatagccttcacgaactaaccaaccagaaaacttctcacaacgaattccgcctgtacaataagttaaaatctttttaccttcaagtacttctttgttttcacgaatccaatctggtaattcacggaaggattcgatatcaggtttaatcgcacctttgaagtgacctaaatcaaattcataatcatttcgtgcatcaatgataactgtatcttcttgtttcattgcttcataaaaatcttttggctctaaatacttcccagttatttcgtgcgggttaatgtcatcttctagacgaagtgtaactaactctggacgaggacgcacgtgcattttcttgaatgcatgaccatcagcttcatctattttaaatacgataccgtcaaaacgtggatcattgttcattgcttccatgtatttctctgtttgctctacagttccagaacaagttccgttaataccttcttttgctacaagaattcttccttttaattcaagtgaattacaaaatgctaaatgctctgccgcgaattcttctgggttttcaattgttgtgtacatgtaatatagtaatactctgtatggttttgtagttgccaatgtatttctaccacctatctaattttttaaatcatgtataagttaacgttcatatcaaaacatatataataagaaaatgaatcccattttcttttctttatactattttctatcagttaacaaaaataaaaaacaagattacacaccaaaacactatggttatgttgtaatcccaatatattatatatcatacaaatgcaattccatcaattaatatgctgtattatcagctttatgttcacataaatttcaaaaacagccctttaattcactatgtttccccacgtcatcacaccataaactcccaattcattttacgttatcacaccatccattgcataaaggcatataatttgcattaaggaaactttcgtgttcaaatgaaattaccatataatatatttaaatgtattgaaataatgagtaagaataaatacaataatttcatcaagttaacattttaaaggggaaaactactatgaataaagatataacaaaagatgaacatctcccttctgaaagtacaactgtacaatcagctcacttagctttaagtggagaaacaaaaggctggaaaagactgttaccatttttaggacccgcttttatcgcgtccgttgcttatattgatcctggcaactttgctacaaatatcgcagctggttcacaatatggatatttactattatgggttatactcgcttctaacttaatggctgtattaatccaaactttatcagctaaattaggaattgctacaggaaacaatttacccgaaatagctcgtgaaaactttccaaagcctgtgtctatcggcttatggatacaaggtgaactagttattatggctacagatttagcggaatttattggagctgctttggggctttacttactatttggaatcccgatgctacctgccgctttaattactgcagccggatcatttattattcttgagtttcaacgtagaggatttcgtccactagaagctattattacaggaatgattttcattgtagtaattgcttttgggattcaagttttttatgcaaaaccagaattaagtccccttctttcaggactatttattccaaaattccaaggtgtagacagtatattacttgcagcagggattttaggtgcaacagttatgccacatgcaatatacttgcattctgcattaacacaacgccgcgtggtcggaacaactgacgaacaaaagaaaaagatttttcgtttcgaatttatcgatattattattgcaatggttattgctggagcaattaatgcaagtatgttaattgttgctgctgcactattctttaaaaacggcttgcacgttgaagatttagatgttgcttacactcaatttaccaatttagtaggtcctgtatcggctgcattatttgggattggacttttatcagcaggactatctagctcttctgtcggtacaatgtcgggtgatattattatgcaaggtttcattcgcatgcatattccgttatacttacgccgatttattacaatgattccaccattagttattatcgctttaggtgtaaatccaacttacgctctagtcatgagccaagtcgtcttatcattcggtattgcatttgcgctagtaccacttattatgtttacaagtaacaaaaagattatgggtgcactcgttaaccaccgtataacaacatttatcgcttggataattgcagcactcgttatcattttaaatatcttcttactgtatcaaacatttgtaggataatgaaaaagggtattccaattttaatttggaatacccttttttcattatttgtattaatcctataaagtctttttaaaataaattttataatctatttccagccaataacttccttacaccttgaataatctttattttcagattaaattatataataacaaatacattctattttcatgtgaaaaggagcgaaaatatgtttcctttattaaaaactgaaagactcattttaagagaacttaccaaagaagatgcaccgcgtatactacaatgcttttctaatactaatgtactgcgctattatggccaaaaaccgttacaagatattgatcaagtgaagcaaatcattcataattttaagttgagttacaatgcaagaagcggtataaaatggggaatcgaattaaaagacacgaaagaactcattggtaccattggttttcacgattggtcttctgagcataaacgagccaatataagttatgcctttttgcctgaacactggggaaaaggatatgcgactgaagctgtttctgagattatatcatacggtttccatacgattcatttaaagcggattggagcaattgtatttcttgaaaatgaagcttccaatcaagtactattaaaattaggctttgaaaaagaaggcgttctaaaaaattatatgtatcaagatgatgtcccatatgatacgaatttttacgctttattgaaatcggtttaatagaattcatgtgtaaaaaaccttacttttaaaaagtaaggttttttgtatttattcattagcaatataagcattcttataagtataaataccaccaaattgatgcttttcaattccttttacataatccttttgtacatatgctgagccaatatgataaagcggcgctaccgcagcatcttctaataatacctgctcggcttctcgcaacgcttcccatcggttttccgtatctagtacaaaatccgttttcgctttctttattaattcatcgtaatgaacattagaataattcattttattattcggattccctgtcgtaaataactctaaataactaattgggtctttatagtcaggtccccaatttgccatagttatatcgtaatcacctgtttgttctaactgtaatttttgcttaaatggctgttgtttaatttgtatcgcgattccttgcaaattcttttctaaatcaccttttatatattctgccatccgttttgcattatcttgttcaaacgttaaaaactcgaggtttacttgctctacttcaagctcttttttcgcttctttccaaatcttttgcgcattttgcaaatcatatgaagaaagatctccgttttcttttctaaaatctttaccggtcacttcatttacatgaccaactggtacaagcccgcttgcaggttttgctccgttattaataaagtgagcaacaaaatcatctttatttaacgctaatgaaatagattgacgcacctttttatttgctaacgcggtatttttttcattaaaacgaagcatggcaattccaggatcactcgacatatgtaattccttattccctctatacttgtctacaatttgcgaattaataggtactcgatccaaatctccggcttcatataaatttacagctgtcattgtatcctttacgatatgaaagtttatttcgtctaatttcactttcttttgatcccaatatgtagcattcttctttaattgaaactcttgttcatgcttccatttttctaatacaaatggcccgttatatatgagattactaggttccaatgcataattgtttccttgttctttcaaaaatgattcatgctgtggtaagtatataggtagtgctaacaactgtaaaaaatacggaaccggctgttcgagttcaacttctaacgtataattatttattgctttaaccccaagtgcatcaagaggcattgttcccttattgatctctttcgcatttttcacataaaagagcatggacgcatattgagatgctgtttcagggttaattgcacgtttccacgcaaatataaaatcatttgctgttacactatccccatttgaccattttgcatctttacgcaagtcaaatgtatatttcttaccatcttcacttcttttaaacgattttgctatggctggagtagactgatcttgatcatttaatacatataacccctcaaatatattctgcataacgtgggctgatgtaccatccattgttttcgcagtgtccagagaaggaatttcttctgatactgttacatttaacacttgttttttaacctctgtatcacttttattcgctttattattacaagctgttaataataaaaatgtaacaagtgccattaccattaaatggctcttttttcgcttcatgagttgttctccttaaatataaaatattataaagcgtaatatattatagcagaaatactaacagaaagatgcgacattcttttgaatatttattcgttcaagaaaaaagctatcctttaaaaggatagctttttcaactgccacataattatctatctttgcaaacctcgtttataacgacttgcttcaaatataatacgctcttcatctaacgttttacattcgccattccaaacgacatgttttccgttaataattacatcgcttatatcttttccactagcagcatatacaaggtgtgataacacttcatccgctggttgtaaatgaggcttattagacggatcaattgtaatgaaatcagcacattttccaatctcaagtgatcctgtttgtttcatcccgattacttcagcagctccttttgtcgcaagtgtaagagctgtttcaactggtaaagctgttgcatcttggtgaatacctttttgtagtaaagtcgctatgcgcatttcttcaaacatatctaaattattgttagatgcaacactatctgttgcaattcctacttttattcctgcttctagcatcgcttttacattcgctataccagaacctagttttaaattactattcggattatgagctactcgaacgtcattttctgctaaaaatgcacgctcatcttcatttaatactacaccgtgtgcaataactgttgggcgtttaaacaatccgcagctcgctgcatattctactggacgttttccatattgtgcttcaatatcacgtacttcacgctctgtttcagaaagatggatatgaaccatcgtttgattctctactgcaatccgtgcgcactcttctaacaattctgtactacatgtatatggactatgtggtgcaaccatcgtagttaacatgccactttcgttatagtaacgcttcacatatttctcagcttcttcaatcgctttcttttcatcgtctttcgttccgaagctaaataaagtccttgaaacagcagctcgcatcccgctccttgataccgtttccataattgcgtcttgatctactccaattggattaaacatgtcagagaatgatgttgtaccacttttcaccatctcaagtaatcctaattccgtactagcgaccgcaatttggggagtaaattgactttccagtggccaaattctcgtctcaagccacggctgtaataacatatcatcgccaatacctcttaggagactcattacaacgtgtgtatgtgtatttacaagccctggtaaaacccactttcctttcatatcaattacttcatctacttcaaaatcattagcgaattctccgctctttacatctataatttgatcattttctacaatgatatatccattttctatcacttcgttttgttcattcatcgttacaattgtagcgtttacataagttgttttcaaaagtatttcccctttcaactctatgaagttccctttaataagttaccaccattatagtaacttattaaagattaagagtcaaaagataatttgaattctttcgttactttttccttcaaaatgctatattgtttttcatttgtatctgcaaatgcttctttccgatttgattccacatccatataattcaatttcccattgaattgagtctctgtaaaatcaaatctctgcccatctataaagttataaaagtgccatacctctcttacttttgtctttttaatttctcctccatatatgtcttgaacgactagagccgttacaccacactgtccctttgctgggttttcaattgtccactttgaactcgtttcaatcgaccacgattttattagtgcttcatatattcttttttcctttacatcatccattctaatcttcccctactattaatagttttacacatcatatttcaaaagaggcagtacacgacccttaaagacagttgatggtgtctctcctattaactgtgcccccattttcaagtaatatccttttgcattcggatcactatcaatcgtaaaactttttaatcctagttcattggctttttctattacgtactcccaaagtattttcccgtaaccttttcctttgtaatcaggatgaatgtacaagaaatcgagagctttatcattacgtaaaaatgagaaaaaaccaatcttcgcattatcgttttctaaaacatatacaaaattattttttatgtattcttctgtaattgttaaatcttccttacaagcaagtatgaattcttcactataatcccacgttgcttttgattgtagtgcgaattcacttaattcatttgcttcacttaataacgcttctcttatcttcatgattctttctcctcaccttcgatatgtaaactactaaattgattcggaaagcacttcaaaaaacctttttttcataaattagaggttatttttataaatctttattataaccagtacaatttttttaaagaaaaagaacaccatccctaaaagttggtgttctctttttctaaaatttaatcttcaaactcactcattcgttttactatttcgtacgatacaaacctatacagtttctactaccgcttcaaccattgttccatttttagcataattcgtatgccaagaaaaagctttttctaaaatatgaggagtttgtccacctcttgtttttgcttcttcgtaataagcacgtagttgatcacgatacattggatgtgcgcaattctcaataataagttccactctttctcttggcgcaagtccccttaagtcggcatacccctgttcagtaacaataacatctacatcatgttcagtatggtctacatgagaaacgaaaggaacaatacttgaaatgttaccacctttcgcaatcgatttagtaacaaagatagctaggcgtgcatttcttgcaaaatcaccagacccaccaattccattcatcatttttgtacctaaaacgtgagtagagttaacatttccgtatatatctaattctaatgcagtattaattgagattaatccaaggcgacgaatgatttcaggatgattggaaatctcttgcggacgcatcattaatttgtcacgatatttttcaaagttagaaaatacttgttgcattttctcttcagaaagcgtgatagaacaacaagaagcaaaattgacttttccagcatccataagatcaaaaactgcatcttgtaaaacttcagaatacacttctaaatcttcaaattctgaatctaacattccatgcaatactgcgttagcaactgaaccaattcctgattgtaacggcgctaaacgatttgttaatcgccctattttaacttcttctcgaaggaattctattaaatgctgtgccataatgaccgtttcttcatccggaggaacaattgtcgatggcgaatccaattgattcgtaaacacaattccctttactttttcaggatcaattggaataccgattgttccaattcggtcatctgttttcacaagcggaattggaagcctctccccttgtttacctggttcatatagatcatgtagtccctctaattgcgtggattgagccatattcatttcaataataatagacttagcatttaaggaaaacgctaaggaatttccaattgaagtggttggaataatcattccgtcctctgtaatcgcaaccgcttccaaaatagcgaaatctatatccagaacgtcagcgcggagtaactctgctgtatgagataagtgttgatccacaaataaaaagtctccgttattaattccttttcgcatcgtcgcgtcagcttggaaaggtaatcttttccctaaaattcctgcctcagcaaataatttgtctacatccgagcctaaagaagccccagtataaacatttactttaaaagattcatcattcttaactcggtttacaagcgcaaatgggactgcttttacatcacctgcacgtgtaaacccacttaagcctaaagtcattccactttgaatccaggaagctgcttcttcaggtgtaactacccgatcttttagacgttgatctctgattctatctaaattattctccatatgtaatccctctctcattgaatattcataattattttacacatttacactatcaaaatagggattttagtatacaatgccgaaaattcagacagaacagcaaatttaggttctaaagcagaaaaatttagaatcctagaagcttacggaaataactagcgtatgattgactaactggtactctctcaccattatccatcgaaagtacaaaagtagaatgggtatcaggataaatcgctttaatatgattaacatttacaataaatgaacggtgacatctaataaatgaatctttaggaagcaagtattcgaattcttgcagagagtatttatgtgttcctgataactcttctgaattcacgtacgtctttttatctttagcctctaaatacataacctttgaaaaaggaaccggaatccagccatctgttgtttttaaagtaacgactgactttccatccgttaaagctggataaattgccgttacgcacccttcaagctttccattgtttgaaaatggtacagccattccatgataaggaataccaaaaacatcccgattcataaactcagatgttttttgattcatcaccatcgctttatgagcaatcgttccttcctttatagaatccccagcgctaatctttaaatcaattcgtttacttggccgatagtaaatatattctttcgtattcgaaacagcaattgaaatttcatctgaaaataattcaccaacaacatctagtaataaacctaatgttctatcttccattctattaacacctcattcactattatactactattatgaacgagcatctgttgctttataaaaagtttgattttaaattatttttaaaattagttttattcactattacttcgttactacaaaaagcctcacttcagaaaagtgaggtttcctctcatacaatatttctttattttttaacgactatagaataagatttattttttattaagtaaagtgaatttaagaatttattgcccgtatttctgtaaaataaataatcccaaactacaaacagtttgggattatctttctcatttattatgcgcatctaaccaagaaattaaatctttaaatacttcatccttatttacttcatgaaacatttcatgtctaccattttcatataaacgtagtgtcacgtctttcacaccacattttttatagttttcatatacttcttttacacctttccccatatcgccaacaggatcacgatcaccagaaaatatatgtattggaagattctttggcgtcttcttgtattcttctagtttatttacttctaatacaccagaaaataattctcggtaaaaactcgtcgtacaaatgaaaccacataacggatccgcaatatatttatcaacttgattattatctgaagataaccaatcaaattttgtacgatttggcttaaagttcgaattgaagtttccgaaagataaaaagtttagcattggacttttcgtttttgcaccacgcaatttcatttcgattgttgctactttatgaccaatagctcctaaaagccctggatttccacctgttcctgaaatcagaaatccatcatataattcgcctctaagttgcacagcacgtcttgataaaaaagaacccatactatggccaagtaaaaataacgggcatgtctgctcttttcttaccgtttctgatacaaaaataacatcagacacagcctcattccaacctacatttggtttaaaatgaccataatcttcttctcttttcactgttttcccatgacctttatgatcatgtgcataaacaccataccctgcttctaataacgcagcaataaagtctgtataaacacctgcatgttctgtcataccatgtgcaatttgaataatccctttcggtttaccttctggcaaccacttgcgtaaataaatttctgatccatccaatgccgtaacgaaactttcctgtacgttcatttcgtcagctcccaactctattatgtatctttaaaaatgaatatcgattcatttttcttactatgtattatatgcaattgccttcattatgacaaatgactaccttttccaattagctcaataactattatgttgacgaatcgaaaataaaattatatagttacttacataaagtaactgtataatttttaggaggtttctactattatgatgccatcattatttttagcacatggttcgcctatgctcgctattcaagatacagactatacacgatttttaaaaacacttggagaaacatataaaccgaaagcaattgtcattttcactgctcactgggaaagtgaagtattaacgatttcctcatcagataacgagtatgaaacaatttatgattttggaggttttccccctgagttatacgaaatcaaatatcgtgcgaaaggctcttctagcattgcatctatgttagaaacaaaatttaagaacaaaggtatttcagtccatcataatatgacgagaggtttagatcatggttcatggacactcctgcaccgcatgtatccagaagcaaatattcctgtcgtgcaaatatcagtcaatccattcctttctgcaaaagaacaatttgaaattggagaagcacttaaaggactcggacaagaagatattttagtaatcgggagtggtgttaccgtccataacttacgagctttgaaatggaatcaaactacacctgaaaaatgggcaattgaatttgatgattggattattaaacatatgcagcataacgataaagatgcattgtttaattgggagaaaaatgctcctcatgcacaattagcagtaccaagagcagaacattttgttcctttatttatcgctatgggaagtggtgaaaatagcggtgaagtcattcaccgtagttatgagcttggtacattaagctatctatgtcttaaattttaaagaaaaggatgaagcaatcattgcttcaccctttttttattcactaagttaactaacttccaaatgttgtttctctgatacctcttcgttcttattatgaaaataaacccagatacacgcaataaatagtagtgatgatgtagagaggaaaacatattggaagcctgcatgtgctgcaatttgccccccgagcactggaccaatcatatttcctaaaaactgaaatgattgattatatccaaatatccgtcccgtaacatgggttggtgtatgttgttttagtagagtttgtacggaaggtaataatcctgcttgtgcgatacctaataaaaatcgaagaattaataggtgccaagctgaggttacaaatgcttgcgggataaaaataattcctgcagcaaataacgctacaactaacgttttttgaggaccgatatgatctgataatcttcctagtcttggtgctgccaaaataacggctaatcctgttgctgacataactgctcccgcaattgtttcaatatgtgcagtatgaggacctactaaatttttcacgtacaatgtaacaattggttgaactgacatattagcaagttgaataataaatgttgttacaaataaactaataattaaatgcttcgctgggaccatcgtccatacttttttcggctgtgttttttttgcttgagcagagtgattttcttcatgcaagaagaaaaaaacgatgagaaaggaaaggaataaaaaagctcctgtaacaagaaagacatgacgcattccaattaactcagacaaatatccaccaagtaatggaccaagtaaagaaccgctcacgccaccagttgaaattgtagaaattgcccaacctgaatgttctttcggagtttctgctgcaataaatgtcattgcggttgaaaggaaaccagatactgctcccattaaaaatcttagtgcgactaattgatatacatccgttacaaaccccataagcgtcataataatcgccataccgaggctagcacgaataagcatcagtttccgtccatgtatatcaccaagctttccccatattggcgatacgatcgcacccattaaaaatgttacaccaaatgcaagtcccgaccactgtgcaatacttgaagtgccagttactcctaattcctcaatataaaaagataagaaaggaattactaaactcataccggctgcagtggtaaaacaacctagccaacaaatcattaaatttcgtttccagctggccattttcacaccttctttctttagatacccattctacaccctttcttgtaaaaagtttagtaatttgctttttatgcaagatttactacaaaacccgctattttctagtaaaaaccactacatctctacatcattttcataataaaaccaactcctctatatgaagttggttacttattatctatcggtattaaacgagcattacaatttctctcgtaaaactcaatgggacctgcttgtccaataatcgcatattcatatccatcttgcttcatattatataaacaatgatacaataattcttttcctacacctttcacacgattttgtttcgctatgcccattggaccaaacaatcctttctttcctctcactacatcgtaacaggcgaaaccaactattacttcctcctgctgtgcaatatagataggtaacttttcattatatgtccgatatccgtaatcaaccgactgtaaccaccgttcaccaaattcagccgccacaaatcgtgataacttatcaaaatcagaaggactagctcttcttacatgacaaaataatgtattataaatagatttaaaactatttaaatcaaccgctaagtctctcggtgcagctgtaatacgtaatatatctttttgcatttgtgtatgtataaattcaccaatatctgtatctacacgaaataatgcatacataacatgtccttcattgattactacttgctgaaagcgttccatacgtttcttcgctatttgtaaaatttctatcgccttataagatagtttatattgtcctatttttttatactcttgatgatgtaaatcgaatcgttttcgtaacgaaagtttttctaaaaaatctggaccgactttatgaaacaaatacataaataactcagcgcaaactcctgtaccttctttacacatacctatgaacagatggactggttgaattatgttatactcactctcttctgctgcaatctccaatattttatgcacacgttttgtaaattgaaattcctccatatgtgtttccaccctctactaatttactaacaaaccgtaaccataaataattgaaacaattacacctactaccaatatacctggaagtaaatttgccaccttgattttaataatactaagcaagttcaatccaatagcagatatcataatgccgcccgtagccgtcatctccactataaattggttcattaattcttccgggacaaaactattaatttgtgttgcaaaaactgcaataccaccttcatataaaacaactggaatcgccgaaaatactacgccaattcctagagttgtcgttaatataatagaaataaatccatcgataattgccttggtaaataaaatattatgatttccgcgaatcccactgtcaagtgcaccaagtatccccatcgcaccaattgcaaaaattaaagtagctgttacaaaaccttctgatatgcttcctttccccttcgatccaactttattttctagccaatcccctaaattttttaacttttcttctaattgtaaccactctccaattaccgtaccaatcactaaactcagtatgacaacaagaaagttttcactttttaatgccatttgaagcccaagcacagtaaccgctaaaccgattgcgtgcattatcgtccctttcatactttctggaatcctactaaataatttaccaagtaaagtaccaaatataatacaaattccatttacaactgctcctaatataaccatttctcattcttcacccttcgaattctttatttctatattttggtttatacattgatttacaggttatctatatgttaacttaatattgagaatattaacaaatgttttccactacataacccgctgtttttttgtaactttaattacctttaatagattcagtgttaatttaattgcgggataatattaaaagggaaggtatatatgaaaactttactaaaacgatttttgttaatagcctttttcattacaccgattgttttattaatcaattactcttttatttcaaaagcaaaagacaaacccgatttacaaaacaaatctagtaaaaccgcttcaaaaagcgaaaagaaaatagaagaccaagaaatcacactcaccttctctggtgatacaatgtttgattggcaattacgtcctataatcgaaaagaatggggctgattacccattccaacatgtaaaagaagaaataaaaaaagctgatatttcttttgtgaatttagaatcggcatttacaacgaaagaaaagaaagcacctgggcaactcttttggattaaaagtgatccatctacactacaagctattaaaaacactggatatgacatcgtaaatattgggaataaccacacacttgattatgggcaagatggattattagatacgatttctcacgtagaaaaattaaagttcccttacattggagccggaaaaaatgcgaaagatacatatacagcacgagaaatgaccgtaaaagggaaaaagtttaaatttctttccttcgttcgatttatgcctgattctaattgggtagctggtgagaataaacctggcgttgcgaatggctatgatttaaatcttgtaacaaaaacaattaaagaacaaaaacaagatgcagactatttaatcgtctatatgcattggggcgttgaaaaatcaaaccgtccggtagaataccaaaagcaatatgtacctaaaatggttgaagcaggagctaacgcgattgtcggaagccatccacattggttacaagggtttgagtattataataaagttcctatcgcttactcattaggtaactttttattcccaagttatgtgaatggaaaaagcgccgaaactggcgtattaactttaacttttaaaggaaaggatgtccaaatgtcattcaatccttatatcattcgcaacaaccaagtttcccctgtaaatgaggaagaaaagaaaaaagctcttcaatatttacaaacaatttcaactgatgtagaaattgatgatacagggaaaataaaaaataaacgaaactagacagctcaagatctatttctctgtaatctactttacagaataggtgataaacatgctgaaaaacttattagaaaatgtaagtttgttagaaaatatttataaaatgtctatagccgttctacttttatgttcagttttttctgttagatttctaaaaaaaataaaacgcgaacgaaaacttactacctttgaatttactatgtatgtaattattcgcattgcgatatttttttggttaactagctttattcttcttgaatttaatgagtatctagtttaactataaaaaagatagaacaagcactatatttctttgcttgtatctatcttttttatttagatgcttattcttcccttctattaaataagcaaatcaaacaaaacagggtttttattaagctccataaattgaatattattttctttaaagcgagtaattaattgctcataatcttctttatgttttaactctactccgactaatgctggaccattttccttattatgtttcttaatatactcaaaacgagtaatatcatcttctggccccaatcctttatcaagaaattctcttaacgcgcctgaacgctgtgggaattcaatgatgaaataatgctttaacccttcgtaaatgagagatcgttctttcatttcttgcattctatcaatgtcattatttccaccacttagcgtacatacaactgttttaccttttatttcatccctgtataaatcaagtgctgcaatagagagtgcaccagccggttcagctacaatcgcatttttcttatacagttctaaaatcgtcgtacaaactttcccctctggtactaaaacgatgtcatcaattacatctttacaagtttcaaaagttaactttcctacctttttaaccgctgccccatcaacaaaactatctattttctctaatgcgacattatcattttgaagaaaagcctctttcatagaggcagctcccatcggttctacaccaataacctttgtagtaggactaacaccttttacatatgtaccaacacctgatgctaatccaccaccgccgattgccgtaaagatataatcaaccggtttctccatatcatgcataatttcaactgccactgtcccttgaccagcaactacatacggatcatcaaacggatgaacaaatgtcattctattttcttcacaataacactgtgcttcttggaaagagctatcgaatgtatcaccaactaatacaatctctgcgaaatcaccaccgaaaaattgtacttgtgatactttttgtttcggtgttgttgtgggcataaatattttcgacggaatcttcaataaattacatgtataagcaactccttgcgcatgattaccagcacttgcacaaacaacaccgttttgtaacttttctttcggtaaactttgaatcaaattgtatgcaccacgaattttgaaagagcgaattaattgtaaatcttctcgttttacataaacgtcacaatcatatttctcagataaaactgtatcacgttgtaacggtgttttaataacgatatctttcatgcaattatgagccattaagatatcttcaattttcactctctcctttaccttttgcaccattatatatcatccttatctcttttaaattggctcaatcaaaatgtgggattttcagaacagcccctgtattcgccgatgttaccatttgtgcataacgtccaagccagccagttttcactttcggttctggtcgtttccattcttttttacgcttatctaattcttcattactcactcttacttctagcaagcgttcttcaacatcaatacatacaatatccccttgttcaagaagtgcgattgttccaccagctgctgcttctggtgaaatatgtcctactgaaattccacgtgaagctccagagaaacgtccatccgttaataatgcaacctcagcacctaatcccattccagcaattgctgatgttggtgctaacatttctggcataccagggccacctcttggtccttcgtaacgaatgacaactacatctccttttttcactttcccaagcataatgccagcaagtgcctcatcttgtgaattaaaaataacgcaaggtccttcaaaacgctttacctctgttgcaccgcttttaataaccgctccatctttcgcaaggttgccttttaatatacgcaatcctccttcctcactatgagggttttcaagagagtgaataacttccttatctttaatctctgcctcagcaatattttctcttaatgtttgcccagtagcagttattcgatcaagatgaagtactccttctttccggctcatctctttcaaaattgcactaatcccgcccgcacgatcaatatcttccatatgccaattggaagcagggcttactttacataaatgtggtacacgtcttgaaacggcatcaatacggttcatatcgtaatctaatccagcctcttgcgcgagcgccaatgtatgcaacactgtatttgttgaaccgcccatcgccatatcaagcgcaaacgcatcatcaattgcttcttccgttacaatgtctcttggtttaatatctctttcaattaaaattttcaatttctctgctgcttgtttaattaactcttcacgtcttggatcaattgctaaaatactcccgttaccaggaagagctaaacctaacacttcacataaacaattcatagagttcgcggtaaacatacccgaacaagagccacaagatggacagccatgatcttcaatatcttttaattcttcttctgaaattttcccagattgataagctcctactccttcaaaaacggaactcagatcaacaacttctcctttagatgtttttcctgctgccattgggccgcctgaaacaaacacagtcggaatattaatacgtagtgcagccatcatcatacctggtgtaattttgtcacagtttggaatacaaatcatgccgtcaaaccagtgtgcatttacaaccgtttctactgaatctgcaattatttcacgactcggaagagaataacgcataccgatatgtcccatcgcaataccatcgtcaactccaattgtattgaattcgaatggtaccatacctgcctcacgaactgcctcttttacaagtttcccaaactcgttcaagtgtttatgccctggaataatttcaataaaagaattacaaatcgctatgaaaggtttatcaaaatcttcatctttcaaaccagttgcttttaataaactacggtgcggcgctttatcaaaaccttttttaatcatgtcacttctcatcttgtcaaatcccctcttacatatttttcatttatactctcttactctatttctttactaattctttcggtgcatgaatccaactcatcatttcacgaagctctgctcccactttttctaattgatgattttgttctgcttttttcattgcgttatacgtcggacgccctgcttgattttctaaaatccatttcttcgcaaattcaccttgctgaatttctgtcagaacacgcttcatttccttcttcgtttcatctgtaacaattctcgatcctgttacataatctccaaattctgccgtatctgaaatagaatggcgcatattcgttaatccaccttcgtacattaagtcaacaattagctttaattcatgcaaacattcaaagtatgcaatttcaggacgatatccaccttccgttaacgtttcgaacccggccttcacaagtgcagttaccccgccgcaaagtacagcttgctcaccgaataaatccgtttcggtttcttcttggaatgtcgtttcaattacacccgcacgtgtacaacctacaccttttgcatacgctaatgctacatgtagcgctgttcccgtcgcatcttgatgcactgcgactaatgccggaacaccatttccttcttgatatacacggcgaacgagatgacctggactttttggcgcaaccattgctacatctacgtaacttggcggattaatttggccgaagtgaatgttaaatccatgtgagaaaagtaacatttgtccttcacggagattctcttctacttctgatttatatacatgtgcttgctgttcatctggcaataacatttgtacaacttgtgcggttcgaaccgcttctgaaacagacattacttcaaatccatctacttttgctacttcatacgatttaccaggtctaacaccaactacaacttccacacctgaatcacgtaaattttgtgcctgcgcatgcccttgagatccataaccaattaccgcaactgttttcccttgtaataactctacatttgcatctttctcataatacgttttcatactccatacaccccttataatttatttacttgcagtacatcaattaattttttcaactgactaacaagtaatgtcgcttcattttcagtacaaactgctgtgagtttcatttcagaaacgccactcgtatctctttcgtttaaatgtaaagaagaaatataatagccacgccgagcaaaaattccacttatacgtaataagacacttggctcgttatgaataacgagtgaaaaagtatgactcattcttcccacctcttcataatcatttcgttattccctttgtttggcggaaccatcggaaatacgttttcaccttcttctacacaaaaatcaactacgacaggaccttcgtgagcaaatgcttctaacaccacttgtttcgcctctgttgaatttgtcgcccttaatcccttcactccataagcttctgccactttcacaaaatctggtgagccaatttttgactctgataaacgattttcataaaacatttcttgccattgccttaccatccctaaaaatctgttatttataataaatacttttacagggatgttattttcagcaattgtttgtagttcttgaatgttcatttgaaaagaagcatcacctgcaatacaaacgacgagttcttcttcttttgcaagctgagcaccaattgccgctgggaacccaaaccccattgttcctaatcctccagaggtaaggaacgtccgaggttttcttgctttatagaagtgagcagcccacatttgatgctgtcctacttctgttgtgacaatcgcttcaccattcgttaattcacttactaagttgatcacatgctgtggttttaactcagattctttttgcttataagaaagtggatattcttctttccatgcctttactttctgaagccattcatctgtttgtgtataaatagacatatgtaacaacatgtgtaacgcttttttcacatcaccaacaatcggatgctctacagttacatttttatgaaactcagaaggatcaatatcaatatgtacttttttcgagtgcggagaaaaaagttctaatttccctgttacacgatcatcgaagcgaacacctaatgcaagtagtaaatcacattctgttaccgccatattagcagcgtatgtcccatgcataccaagcatccctagaaacaatggatctcccggtggatatgcaccaagtcccattaaagttgaaacgactggaatacggttctcccttgcgaattcgaagagttcatcggatccacctgaatgaatgacacctcctccaatataaagaagtggacgctttgattttgaaattgctttagccacctctctaagtttcatgctgtctggtacaagttctggtttgtaccccggaatatcaacttcttcattaaagaaactggtgacttttgcattttgaacatcttttggaatatcgattaatactggtcccggtcgtccgcttttggcgatgtaaaaagcttcttgcacaattcgtgatacatgatttacatcacgaacttggtaattatgcttcgtaacaggtactgtaattccgacaacatccgcttcttgaaatccatctttaccaattaaaggcgttgcaacttggccggtaatgacaactaaaggaatcgaatccatataagcgtctgctaagcccgtaactaaatttgtcgcccctgggccagaggtagcaaagactaccccgaccttcccagaagctctcgcatatccttcagccgcatgaatggcagcttgttcatgacgagttaaaacatgtttcaaaccactttcgtataacgcatcgtatactggtaaaatcgctccgcctggatagccgaaaacggtcgttacacccaatttcttcaaaccttgaatcacgtgcccagcgcctgtcatttcttcacactgtaacttctcatacgctgtatactgctgcttcatttcaattaactcctctccttatttatgctaagctttccgtcagcccgggaacacgtactcctctttctctcgttaattttttaaattcttcggtcaattgtttcgttacacttcctggtttcccatctccaatttctctcgaatcaacttttacaactggaattaactccgctgctgttcctgttaaaaatacttcatccgctacatatacgtcatggcgagtgaatggtctttcctcacacggaatactcagtcgttcacatagctcgataacactatttctcgtaataccttctaatgcccctaaataggatggcggggttaatacttttccatctttcacaacgaaaacattatcgccagaaccttcacaaacatatccttgttgatttaacataagagcctctaacactcctgcttgtgccgcctcaatttttacaagtacgttatttaaataattcattgacttaatacgtggatctaacgcgtctggcgtattacgtcttgatgcaacagatacaacgcttagcccattatcataaaattcttgtggaaataactttaattgttctgcaatgataattacgctcggcttcacacaacttctcggatcgagtcctaagtcaccttttcctcttgagacaattaagcgaatataagcatcagcgtattcatttttttggagtgtatgtaaaactgcttcttccatttcttctaccgtcattggaattgttagtaaaatagatttcgctgattcatacaatcgtttcacatgttcttttaaacaaaatacatttcctccgtaactacgaatcccttcaaatacaccgtctccgtataaaaaaccgtgatcatacactgaaacaactgccttttctttttctacaaattccccattcatgtaaatgtactggtttcccatctcacatcgctcctcttttttctctatttttgcaatctatttctacatcgattgctgagatgagtaattttaacagaatattcagtatataaaccttaaaaatatactcgtctcaacaatcgattacttacatacttgtagcaatccattgctgagacgagggaatcgtggtaccactcagcttccttatacttctcacgaaatataagctctgcaagtccaattagacttttgtttttctatcgggaacaaccccgctactttttactagttttcaaaagtagtgctccaaggtgattttcaatgagtgaattgttaccaccctcacagcctcggggcagctctctgaaacaatctttatcatttactctcctcttctacgcattctcttcttctatttttaaaaataaaaactctcgcctcagcaatcaactactacaatttagtagctttgattgctgaggcgagagtttcgcgttaccactcagcttccttatacttctcacgaaatataagctttgtaggtccaatcagacctccgtccttttaccggagacgatgccgccgccctctactcagtttccctttcgcaagcgatgctccgaggtgatcttcaatgattcgattgttactaccctcacagccttggagtagctctctgaaacgatcataatcatctactttcctcttctttgcatatacaacatataaagttagaaaattcttaattaacttttatttgttacacgtattataggacgttgttcttttcgttgtcaacatgttttctcaaaaaaatcaaaattcattctatttattttttctcaaatcaaaattggaatgcattacttacatacactcatatattacttaagtatgtttgcattactacataaagaaaaacttataaagtttatgaggagatgaggaaactatgttaaaagggaaagtagcgttagttacaggagcaagccgaggaattggacgagcgatcgctaaacgtttagcaaatgacggtgcattggttgctgttcattacggtaatcgaaaagatgacgctgaagaaactgttcatgaaattcgatcagatggtggccaagctttttctatcggcgcaaatttagaatccttacacggtgtagaaaacctttataacgctttagatactgaattacaaaagcgcactggtgaaacacaatttgatattttaataaacaatgctggcattggtcctggtgcttttattgaagaaacgactgaacaattttttgatagaatgttttcagtaaatgcaaaagcaccattctttatcattcaacaagcactgccacgtttacgtgacaatagccgaattattaatatttcatccgctgccacccgcatttctttacctgattttgttgcatatagtatgacgaaaggcgctattaatacaatgacttttacgctagcaaaacagcttggagcacgaggaataacggtgaatgcaatacttccaggatttattaaaacagatatgaatgcagaactcttgagcgacccgatgatgaagcagtacgctactactatttccgctttcaatcgcttaggtgaagtagaagacattgccgatactgctgcattccttgcttctccagacagccgctgggtaactggacaattaattgatgtgagcggaggatcttgtttataaaaaacatatattttcaaatcttttttattgcgcaataaaacaatttatataatactatataaaacatatacatttaggaggattacagcaatgtccgaaaaaacatacgaactcgcaaccttcgcaggcggttgcttttggtgcatggtaaaaccatttgatgaacttcctggtattcataaagtactttctggctatgcaggaggtcatgtagaaaacccaacatatgaacaagtaaaagctggaatatctggacatttagaagttgttcaaattacattcgatccttctatttttccttatcagaaattactagacttatattggccacaaatcgatccaactgatgatggcggacaattttttgaccgtggtccatcttatcgtaccgctattttttatcataacgaaacacaaaaagggcttgctgaaaaatcaaaacaagctcttacagaaagcggtatgtttaaagatccaatcgtgactgaaattcgccctgctgcacctttttacgcagcagaggaataccaccaacatttctataaaaagaatccagagaaatatgctactgagcaaaaggaatctggtcgtgaagactttattaaagaaaattggcaaaaaaaataataaaaacgcatcgtgcttttttaatacgatgcgtttttatttttgataaaagtaccatacaatgatgagaacaaccgctgttaatgcccaaagcgctacttcatttttcactctactctttttcttagtcatttcatctcctcctaatagcaatacaacgtattcaagatttcctctgtttcattgtccaccttatatacataaatacatccttaccaatccttataacaagaccaccaataattccgattgcaattgaaattactaacatctgtccaaagctaaaagaatttgtgtacgttatgtagagaacgatacatataagtaaaacatccggtaaagaaagcaaaaactttttaagcatttctttatctcctctatactttatttatatcttctactgtaattttgaaatatagtttgttcaaaaattccatttagaccctcattttatgaaaaataataagaatcccttttcaaaagagattcttattcagtagatttaagtttaattattttctacatatcctattccataattactcctaaaatagaataatattactaatcatttattgtaaattgactatttgccaggcaaccgaatgtcgcgccagctacctacatcgcattggccaaattcattattacctaccgcgactaccgtgccgtctgattttagtccgactgtatgtgcacaaccagccgctatcgctacaatatcgcgccaatcgcttacgttacattgaccatactcattccagcccactgccaccacggtaccgtctgattttagtccaattgtatgattcgtaccaactgctattgctacaatatttatccagccacttacatcacactggttatgtttatcattccccactgcgactgcttcaatatctcgccagccacttgcattacattccccttctttattccggcccactgctactaccgtgccatccgatttaaggccaacagtatgacaacgccccgccgctatcatatctttgggccatcgcttcactttttctttcgataaaaggtaatccatgttttacctccttgcatataagcaactgtatcataatagatatttttatcaaatttcattataaatctacatttacaaagaaagcttattttacttcttcaaaaaataaaaacctccagtttaaatactagaggttttctcgttatttcttcaagcggtcaataaaatcgttcaatttatctagcgatttcatattctgattgcaagctacaccatctttgcaaatgtagtttccctttttaacgaaagttcctggtacatcgcctttaatttcaactaaaaacattcctacttcttcatgcccatgacataatgaacaaatgctttttttatttaaactttggaacgttccttgcagaccaacaaatttatttttatcatttttcgctataataaatttcctgcttgatcccttatcaatccagcttaaataagatatttctttcatatccatttcttccatatcaggaagttttaacttttttgccttaggaaataacttttttaatgtttgtgctgtaacttcttgaaacggaattacatacggatttattttcattaaaaatgactctgcatcttctctattttgaactgttaataccgtatcaattaactctttctgttcatccgttaaattctcaaatacatgtattatcttttcaatcgcaagcgattttaacgcttgaattacacctctatcatttgccgttgcatgcccgtttgctaaaatataagcttgtgattttataaaattatattgatcacttctaataaacgcttccatctttatcactccatacaaattgttgatctagttttattgtatacaatgattacgttttttgatatgtaaaagataacttagaaacaaacattacatatatcacttattctctaccgctgcatttcctgacaaaagaagccatcatccgttttccattccgcatataatacgtcttcaaatttagtaattcctttttgctttatttgtttataaagccacccttcatcaaatcccgcttccctcaaattatccttaactacttttccatcactaattaatgaaattggtaagtatacaggcttatgttttaaacttaaatcatttacagtaggagattcgtatttactttttttcaaaacgcttatgtttccgttaggttccaatatcatatattcaacttctcggattgaaaatatatctttttgttgcctaagcatttgttgtaattggtttatatccaaatgatttacgcttaattgttcacgatcaatctttccattacgaataataattgaaggatatccttcaaaaaaccttcttgtccctcttactttttgtgttatcacttcaatagtataaattaaaattacccaaacaaatactgaatataaaatagaccatactttaattttaggatcatatattgaatttccaacgagctcacctaggacgattgcagaaataaaatcaaagggcgttagctgagatatttgtgttttccctaatatttttgtagcaattaatagaacaaaaaaaccaattaaaagctctatcgttatttgtccaatatgattcatatatgttcacctttctactcttcaaatgttctgtatagcatttaataaaaaaacggcacattttttctattatcatgcccgttcacacttcatatatccaatacatataaaacaaaaagagtctgattcaaagtaatatatgaatcagactcttttcctcttatttagaatacacaatctttttaatcgtttccccagaaagaaaatattcttctgcaagttgatgaatagcaatcccacttttaaacgcttctttaattgctttatttctttcatctaattgttttcttccgccagatcgtgtaccccatttataatgtttcgtttcttgtttcggaatgtaaattgtttcaccttgtatatacttttgaatttcagtaattaaactctccggtaaaacagcattagcttttacgtatttcatttctgctcgccccttattttttatggttcatttcaataaggtgcaaagccaaatataaaaaatgatacgagctcatataggcgattgtatattacttgtctacctcacgcaaagtatcgccatttccatacttggctttgcatgagacgttgcagtgtctggcaattgaattataatcgccatataaacacctcctaatataccttttgcattttattatatgataaattccttctccttgcatccacacccttcttaaagcacgaaattttatctaagaagggctatcagttcgtaacagtaaatgaattgcaaaaaagagcaaaataaaaaggtagcgtatctttgtatgatacgctacctttctttttatataatgccaagtacatttaagaatacgataataatcgcaattggtgcgatataacgaagtaagaataaccataatacgaatagtttataacctttatttttacttacacctagctctttcattaatacatctttcttcatttttaaaggaacaaagatagaaactaataatacaccaagtggcattaatacgttacttactgcatagtccgctaaatcaaagactgtcttcccgaaaatcttcagatcacttaatataccgaatgataatgctgatggtaccccaacaacgaagattaataaccctacgattaaggccattttttcacgtttccctttaccttttgatgttaacgatgcgacactaatttctaacatcgaaattgctgatgtaatcgtagcgaagaagaataataataagaaaacgatgaagaataattttccgaatgccattttactgaaaatagctggcaatacgataaataatagtcccggtccttgagatggttccattccaaatgcgaacacaactgggaaaattgcaagtcctgcaagtaatgtaataacaagagttaaggctacgatagaaaatgctgaacgtggtaagctttcttctttcggtaagtatgagctatacgttaccataacggctaccccaacagataatgagaagaacgattgccccattgcgtataaaataacttctgatgttacatgtgagaaatcaggttgtaagaagaaacgaactccttctccagcaccatctaacgtaagtgcacgaacgattgatacaaagaataaaacgaatagtgctggcatgaaatatttatttactttttcaacaccattttgtacacctttacttacgataaaaatagtaataaggatgaataatagctgtgatccaactgctaaatatggattggaaatgatttcaccaaacgtagcttcgtatgctccatttccttcccatagtctacctgtaatcgcattccataaatataataaaatccagcctcctacaacactgtagaaagaaagtaatatgaaacatgttacaattcctaatttacctaaccaaggccataacgttttaggagcaatctctctatatgcatcaacagcctctttttgtgtacttcttccaataacaaattcagctaataatagcggtaaaccaattaataatgtgaaaccgatgaaaattaggaagaacgctccgcctcctccaatgccggccatatatgggaatttccaaatcgccccaagaccaattgccgaacctgctgcagctaatacgaaacctaatttcgatgtccattgctgtgaattcatttgttaatctcctctctatctctttttctttgttacaattcggtatttatattgttctatcaatacttttttctaatacgttcacttcctccctaataataaaaaaacgcccctacgtaaatacgtagggacgacaaaaatatcgcggtaccaccctagttgtgaagaacactaagaaaccacctaaataaaaacgcccctacgcaaaaacgtagggacgataaaatatcgcggtaccaccctagttatgaagccacaccaaagttaggacctaaataaaaaacgtccctacgtaaatacgtagggacgataaatatcgcggtaccaccctagttgtgaaaaaatcttcaccactttatttgataacggtataaactaccgtctttcatttcctcaaaatatgagatttatgaaagatgctccaggacgaacttcatgaataatctatatactgattcacaccaaccatcagctctctgaaatagggagatattcactactataccctttcattgcccaaatattattttccgaattgattactatcatttttatcacacattaaaaatagtgtcaacttatatttcgaatttttatgtattacaatctatttaaaaattcgaaatataagttttagtttagaaaacaagtagcttagtacataacgaattctaacaggcaatagaaaaagaattacgtattattgatacttattcaataatacaaatcatctagaaacataacctgtctctctgtattcattttttaagagtttgatggataccaagaaaatttcgcatcactatccagtggtctatttttcgtttcttctttaattacacgaaaccattcatttagaatttgagttttgggcaattgagcagcaaggctatcttcccaaattacatgtgagaaccaggctttcgtttcccattcaaactgcaattgtgcgaacgaaattatagggtgatcagctccacgaaattgctcatttactgcatttgaaacttctggagcttgcggtaacaactcgttctgaattctatttcttatcgtctcattttctagctgatcccagaaatacaattgcccatttatttgataaaaaatatcaaatgaagcctcacctttcttcaaattcaataacacgaaggcacgttccacatcattgtcagccgcttttacagcattaacaattatattttgtgccattgatacccagtaactagtcgcttcctctaccggtgattcaacatacaattcttcacttaattcatgaagagtagcttcttgctcatttactttttcaacttttttaaaaaacctattaaaaaaacccataacttcccccttattactattttctatttcacaaaataaaaaatagatttttcttgctcatccacatttactcctggcgcgtatgtatgaacttgttgcaacacttcttctattagcaactctaactcctgcacacttttttctggattccctattaatgtgtccgccatacgttcatataatttttcaggtttaatagtcattcgttccacattattaggcatccatttaaacgctggatgatgtacgtacattttattcaaaccaaataaaacaccgaatacgttcctttgtacttcgcaaataacgtcataaagcataagccaatctttccgttttaaaagcgcctttcgattgtgccaacgattacttaaccatagattttctgaaatcatcagttttgctagttcatctggatatgccgctactttttcttttaattcattcgctttcccttctccatacaaactaacaccatcatgaatggatgatacaatacattgtttttcataatttatatcatattgatccaccacatccgaaattactttctctactgtctctgttaaaaagttactaatctctaatttaattccctctttcgttaaatacgtttccgaccattcttcttcctcatacggatgatacgataatattttcccatcaatatgataaataggggccctacgatcctcatcttccggcggtgttgaccataaaatatgtaattctatatctgaatgttcatcttcaagctttctagctactgaacccgctaaaataatagcttctactttcggattttgcctataaatctctgacatctctatcgctctctcttttaatcccatttcatttccccctaaaattgcagtaatcccctatatttcatttatctatttcgatattacagcttgcattaccttttcaaattcctacttaatcatatttctatccaatagcgctgaataacttcaccagtacgagaagaaactacttcattttctaacacacctccaaccttttgaatcgttttagcagaaccgatattggatttatcgcaagttattaatactttctgcaatcctaatttttgcgcttcagctaatgcaagttgtagttgtttcgtagcgtaaccgtggcgacgtttattcggatggacactatatccaatatgaccgctttcccgtaataattctggatttaatctatgtctaatattcaaaaaacctataagttcccctttttcaaaacttaaaaactgactagatggcactcgattagctagtaaattttctcctagttcttgtttactcactttttcaaaccattcatcaagagaatcaaagttttgtaaagaactacttccatgtggttgttcccctgagtgtaaaaacgcttgtctatacgccgtaatacgctcactatattcatggattggttttaatagtttcattgttcttctccccctcttcattccataaaacaaacaccttaatagcagctattcactattaaggtgtttctatcctttttattcaaataaccccatgctcaaataacgttcacctgtatcaggcgcaatacataaaacttttttaccaacgcctagacgtttcgctatcatgattgcagcgtaaacagatgctccagaagatggcccaactaataatccttcttgtctagctaagtttctcattgtcgttaaagcctcttcgtctgcaatttgaataatttcgttatacacttctgtatttaagtttttcggaataaatcctgggcttgttcctactagtttatgaggacctggtacaccaccggataaaacgggagatcctttcggttccactactgcaatatataagtttggcaatttctcttttaacgtttcaccagcccctgtaatcgttccgcctgttcctgccgttgcaacaaaagcatcaagctctccctccatttgttcgtaaatttcaagtgcagtcgtataacggtgaatattcggattagctggattttcaaattgttgcgggataaaactattcggtatttgtttttgcagttctaacgccttcgcaattgctcctggcattctttgttctgctggtgttaaaactacttctgccccgtatgctttcaataaattaatacgctcttttgacatattgtctggcataattaaaatcgctttataccctttagctgctgcgttcatcgctaaaccaattcctgtattcccgcttgtcggttcaataattgtatcccctggtttaatgagaccattttcttctgcaacgtgaagtaaattataagcagcacggtctttcacactacgtgatggattaaacatttctagtttcacatacacgtccgctgcgtcttccggaataaatttagataatcggacgacaggtgtatctcctattaattctgttacgttttcacataatttcatagtgcatcccctattctatcgttttcttatcacttggtaataaccatgaagtaagtccaattaacggtaaacaactacataatatcataatgaactgaaggctatatatatcagctaactttcctagtactacagcacctagagcaccaaggccgaacgcaagacctacaattagacctgataccatccctacttttcccggaacaagctcttgcgcgtatacaacaattacactaaaactacttgaactaataaaaccgatacataaaaataaaggtacgacccacacaagtgagacatgtggtaataacagcgcaagtggcgctgaacctaacattgaaaatacgatgatgtttttcttaccaaatcgatctgctaacggtcccccgaagaaagtgcctaacacaccagcaatcataaatgcgaatacgaaatactgggcattttttatagataaaccataatgctcaattaagtaaaattgatagaaattcccgataccggcaccgtaccaagagcgcacaaaagtaagaaaaacaagaagtataataacaaatttaatgtgtgtacttacaattgcattttccgcctcaagcgcagctctcttcttccttcttacagcgccggttgctaattcatttttgtaccaattcgatacgaaaattaataatgcaattcctactgctgcaaatgctgtaaaacctaatgaaccaatttgaccgagtggaacgaaaattagcgctgtaaaaataggagctaaagaattccccgtgtttcccccaacttgataaatcgcttgcgctaaccctcgttttgcacctgccgccatatacgcaacacgagcgccttctggatgaaagactgcggaacctaagccaataaataaaacagaaataataacaataataaagtttggtgcaaacgcgagtccaatcattccaagcatacttgaaaacataccgagtggtaataaaaatggtgacggcttcttatctgaatacataccaaacaccggttgcataatcgatgacgtcatatttaacgcaaacgcaatccaccctacttgcatataggataaattcatcgttttttccaaaataggaaacaacgccggcacaactgcttgcatcgaatcatttaaaaaatgtccgaaactaatcgcaaataatattcgatatattgtcggtgtttctactgtgtttttttgtgaaactgcctgcatatgtgaatcgctcctttctgtacaaaatatatatttattacagtaggtgtaataaattctgacttttgaaacatttctattctatactgctttcatttctttttccagaaatataacttaactcccatcattgacttgcatccttgtaactttcagcagtaaaacattatagaaaaaggcaacccaatcacaaactgggttgcctcttacattaaattgcaaaacgcttatacttctcataatcgctcgtcttacattccacttctagtttcgtaccttcattttcataactcgttgataaaacgtgcgcatgattattgaaatacgaaactacctgtccgtgatcatacggaattaacatttcacatttcgtatattctttataaatatgggaacgaatcatttctacaagctcttcaattccaacatgtttcttcgcagataaatacacgcggtcttcttgtactttcggaatttcaacatccaccatatctgatttgttataagcatagatcgttggaatattttctactccaattttctttaacgtttcatttgtaatatcaattaattgttcataatttggatttgcgtaatctacgacgtgaataagtaaatctgcttccgctacttcttctaacgttgaacggaacgccttcacaagatgatgtggtaatttacttacaaatccaactgtatctgttaataaaaatgatttattatctggcaaatcaatatttcgtacagatgtttctaacgtcgcaaataacatatctttttcaaatacttgtttttcttctgtaccattataaatttcaagcattgcattcatcgtcgttgactttcctgcattcgtataacctactaatgctacaacaggtatttcatttttcttacgttgctttcgctgcgtttgacgctgggcaacgagcgcttctaaatctttattcaaaactgaaatttgttcttcaattttacgacggtctaactctagcttcttctcaccgacacctttatttttcgtaccaacgccgccgctctgtctccctaacgattcacgaagaccaattaaacgaggcatcatgtactgaaggtgtgctacttctacttgcagctgtgcttctttcgttttcgcacgttgcgcaaaaatatctaaaattaaaatggtacgatcaatcaccttacaatctaaatcctcttctaaatttcgaatttgtgaaggagataattcatcattaaagatgaccatattcgcatctatttcttgtacatacgctgctacttcttcaatctttccttttccgatataatgcgatggatttactcgttgtaaattttgcgttacttgcccaattacctctacatcacaagcttccgcaagatttgttaactcttccatcgaatatgcaaaatcatcttcattacctacatttactccaactaaaactgctctttgtaatacttcttccatatatttattcctccatttcgattacgtaaaataaaaaacacaggtcgctgcctgtgttttcgtaaacggataagggttcaccaaagaaatagaagaaagctatgctttcatcctattttatagtcaaaaagtcccaagatcgtatacgtatacacaataagcgttcacctatacaatcccattctatttataaaggcaaaacaaaaagagggcgtattcgtccctccctctttttcacatataagcttaataaagggttcctttaaaataggcagaccaatcccgttcactctgtacacagacagagcctttgagcgctattcaattattggcacaaagtattgagacgtaatctgattaagatcaaaggaagcccctccgttcattttaagttacataaagtgtagcataagtaattcgctttcacaaggtttaacaacctatatcacactaaagaaaatcgttatttttttactttaatcgtcattttttgcgagtttttctcacaataaaaataacaaaagcaattatcaattttagaaacttctcgtatattatttttacagcactcgccaaattccttcatagtaagttaagtattatcgttttaatacaacaaaaatctatattgacatttttataacctaatattagtatcaggttataaaaataaaaattaggagatgttcctatgcattctaaatctcgtattactgcaattggtacttatgttccagatcaaatattgtctaataacgatttagaaaagatggtccatacgaatgatgaatggattgtacaaagaacaggaatgaaggaaagaagaatcgctagcgaagaagaatattcctcaaacttagccattaaagcaattaaaaatttatgtacaacatataagaaaaacttagaagatgtcgactgtatcattgtcgctactactactgctgattacgttttccctagtgttgcttgccaaatacaacaatacttcaacatacctcatacactagcttttgatttaaatgcaacttgtgctggttttacatatggactacacgtcggtaatagcttaatcacttctggatcacatgaaaaaatacttgtcgtagcgacagagacattatctaaagttactgattataccgatagaacgacctgtattttattcggtgatggtgctggagctattttattagaaagagatgaagacatcccaagctttatcgctgctcacatgggaacaaacggtgatggcggcattcatctatatagcacaaacttatctactactatgaatggcacaccactgcaaacaaatgaaaaaatcgttcaaaatggaagagaagtatataaatgggcaacacgaacagtgccaaaaggcataaaaaatttattacataacgcaaatatgcaaggggatgatatagactggttcataccccacagcgctaacttacgaatgattgaatctatttgcgaaaaatctcaaattccaatacaaaaaacattaacgagcgtggaatatatggggaatacctcttcagtcaccattccactcgctctagatttagctataaaagaaggaaagttaaataatggagacacacttttactatacggattcggtggtggtcttacacatttagggcttattgtagagtggaatttaatttaagtgtataaaaagaggctctagtcagtaactagaacctctttttcatttaatttcttgccccttttcgagaccatatcacaacaggaataagtaataacgctaacacgcctccagccaatgacaatgccgcataacttgaattcgctactaccatacctgacatcgctccaccagaagctccagctagcgcaataaaaacatctattttcccttgtgttttagcacgtgtagacggtgttgtggaatcaacgatttgtgctgtaccactaatcaatccgaggttccatcctagcccaagtaaagacagagcaacgattaatagtaataaagaatcacttggcgctatcgcagctatgacacccgctgcaagtaaaatcactccaccagctatgctcattgtagttcggccaattttatcaattaacattcctgtaacgagagatggaagatacattgcacctacatgaaaacctatcacaagtcctactgcacttaaaccgtgaccgtggtgtcccatatgaactggcgtcatcgtcataatcccaaccatcacgatttgcgtaagtatcattacgattgctccaactgtaatacctcgtttattttctttcgcttcgtctgttattggttgtcctttatatgtatgttcctgtttatatctttctattatgttagcaataattaacggatctggacgaagcataacaaaaagaactagacccgccagtataaatgctgctgccgatagtatgaacggacctgcaagtttaggaactccaattgaatgcgcaaaactacccattactcctactaaatttggtcctgcaactgcaccgaaagtcgtcattaccatcgtaatactaacagccgttgctctctgcttcttatctgctaaatctgtacctgcataacgagcttgtagattcgtggctgtaccggcaccatatatgagtaaagaaataagtaaaagaataatgctattcgttaaagctgccattacaacaccaattgctccaaatccacctactataaaccctgttgcaagacctatccggcgtccatatcgttgcgaaagcttccctactatgaaagctgctaatgctgatcccaatgtaaacatagcagttggtaatcctgcaaatgcatctgttccaagcatttgctgcgcaagaagtgctcccactgtaataccagcagctagtcctgcaccgccaaacatttgtgaaatgctgacgattattaacgttcgtttgtatagtttttgttgctcttcttctgtgtacacatgattatctattaaagcccctgccttatctagcaattccccatcctccttttaaaattaatccctcttgttaatgtactatgtataacgttacatattcaatggcattttccattcatccctttcattctaaaaaactttctaatcatactcgacttatcccatgctatattaaaaatactactattcacaatatgcaaggagaaaacaatgaaaaaacaggctaatagcagcctgtttccctttacacttcttctactatccttccccttctctttttactcaaagctcttccttcccaaaacaacaaacttacgaaagcacaaattaaaataattggcacacttgctttatataaatctgtaaaactcattgccatctgattcttggcataatgattcacatcattcgaaaatgtgagtacctctttctttatactttcctcttgtttttcaacttcttttgttacttgcctcataacttcttctctttttacatccctatattctactggaacttttcttaatatttcatccgtcttgtcgcgaatcaattcttcctttttctctttacttaatcccattgtcattgcattttgtttcttatttatattcgactctaaactttgattctctattttttctttagtcatttgtaaaatttcagtttgctcagtactattcacatgaatattccgcaccttttcttctgcataatgatatactttttctttatttatagttaaattatgagttaagttagagacaaatattgcgaccgccaatacaattccaacctgtcgtaacattgatacaacactttgagaagcagttaataattctccttcaaacgaagacgcacttaaaactgtaattggccccactactaagccatatccgacacctaatatcatacatggaataataatttctatatttgttgaatgaacatcaatcatttgcaaccaatagtaggaaagccccataacaagaaatcctgacaaaataatagttacttttccgagttttttaattaaagttgctgcaactggtgagacaaaaaatatcatcgctgaaataggtgtcactaaaaaagccgcttcaatttccgttcgaccttgtagtttcgtcaagaacgttggaagcaatacagtaactccaattaaaaataaattactcaatataacaacgattgacgctccgacaaacattcgatcttgaaataactttaaattcaccattgggttatgaatctttcgttctactaaaataaatagaataagagaaatagtgctaattgcataacaagacaaagcaatattactttgccatccccatgtattaccttttactaatatgagagtaaatgaaaaaattgctgtgctacttaatagtagtcctatccaatctatttttgagataatacgttcttcattttttatttgtagcatgatgcaacataacacgattcctattatacaaaccggaacattaacgaagaacacccatctccatcctaaattttgcgtaataattccacctattactggccccatagcagctgacaatccttgtgttactcctaaaattgcaagtgcaacatgccttttagctaacggcatagctgatacaccaattaccatacttgttggaaataaaattgctgccccaatactttgtataaaacgagaaaaaataagaaaatcacctgtattagcaaaagcgcaaagtaccgatccacccccaaaaatcaccagaccaagaatatacatctttgcttttccaaagatatcagctatccgccctaacggaatggcaagtactgcaatcgtcattgtataaacatttaatacccaagacatcttttctaatgaagtatttacactcgattgtattgccggtaaagctatattcataattgtcgtatcaatcatacaaagaaagatacctagacacattaaaaagacaatcttaataccctttgattgctccatctttatatacccctttatttattgtgaatgcgtttttcactcttctgttttattgttttctttcgcctctaactcttctaattttttcttcaaagtctccacttgtgcactatacgatgcaatacctacatctagtgaaatttcttcgacgaaagtaatacctattctccacttttcatatttcaatcgaagatctgcaatgtacgcttcttttctttcaatttcatctttaatccatttttttattgttacatcatcactatagttgccaaaatacattctcattaaaaaatccgaacgtaaaacatccttctctataggcgtctgcatgtattgataaaattcttcacgcccctcatctgtaataaagtacattttcttattcggttttccctcttgcatgacaacctctttttttattttcccttcattctccaattgccgtaatgttggataaatcattccaaaacttccatcaaaaaaatgagtaaatacgtcttcaaacacaattttaatatcgtaaccagacaattccttttccattaataaacctaaaacaacatctcttcccttcaaagtaaaacccccacatagtatataatcaataatcatattaacattgttaatatgattattgattatataccttattctgttaattgtaaaatgtttctaaataaaaaagccccataatttggtttcaccaattcacagggccattttcttatttactctttaacacctacaccttgcaaaacttcaatatcctctttcatttcataataataagaaggcaattctataccatgttctaagaaataatcctcaatgaatgaaataataatttttaacgttttcacacgagcatacaatttatcgttactttcaataatatgccactttgcatttggcttacttgttttttcaaacatgtcttccattgcttcaacatactcatcccatttttcacgattacgccaatcttcgtctgtaattttccatcttttcaaaggatttttctctctatctttaaatctctttaactgttcctctttacttatatggtagaagaacttccctattatgtaatggtcatctgttagtagtttttcaaaatcattaatctcatcatatgctctcatccactcttcctttgtagcaaatccttcaacacgctcaactaacacacgaccgtaccatgagcgatcaaaaatggtgatttgcccgtactgtggaattttgcgccagaaacgttgcaaataatggtaacgtttctcatgaggtgcaggcgctccaattggatttacttggaacccacgcgggtcaagatgttccgtcacccgcttaattgccccacctttaccagccgcatcccatccttccataacaagcataaccgcgattttttcttctttcaaaatttgctgtaatgctaataagcgcctttgatatttttctaatttcttattgtacttagattttgattcaatttttttcgttaagtctactttagcaagatgtccattttccataaaacaaatcccccttgttgtatgacaatgttattttaacatatttttggtaattttttcatatcctaaaaaaactgtgtagaaacatctctacacagcttccttctctaatttcacatatataagcacatttaactacattaaaataaataatttatactgaactcttagtatattctttttattaaaacgtaaaaatagtccttttaaaaagggcagcaatctaagtatagaaaaacaaatttattcttttttactacatacgtaattatgccggctataagagtattgaataagatattgattcactactcttatagccactttacattatatggtatatttactcgtaaaaagaagataataacaagtaaatccattaaagaatgggagctctaaaaaaatgaaacgaaaaatattaactctctttacacttttatgcttagcactaccaatacaagctagtgcttacacatttcagtcactaccgattgcgtcaaagtctaaacaatggtatgtcgaaattgataaatctcataactcaaacaagcaagcaatccagccaaagcaaggtgtatttgatacgtatagtttactcgtaaaaaacatcggtcatgatgtatcaaacgtatctgtggaaatacttgataacaaccctacctctaaagctacctttaaacctactacacctaatgaaaatatttctaaaagtcatacaagctttgactacatggtattcccattagactttaatagtcataattttaaagttgtaatcacttgggaagaaaagaatttctcttacaatggccatccggtaaatgaaggtaaaaaaatgaaacaaacatttgtatttaatgaagactaagtcctaatttctttagggcttagtcttcttttttgaaacctgcttgtatcgcttccgtcacttcttttgtgatttctaattttgttgtgccaaatatgtacggacagtttttcattacaaaggtgttttattaatactagttgattatatgctaagttattttctatataggtctagccctcttttcccatataatcaattaaatcgacgaatactctgtacagacaatgctattccaattgttaaaattactaaactagctagtgttataatagttatttcgccacctatgacagtagctaaccagcctacaactacataccctaatggcaataaagcaaaagaacccaacatatcaaggcttgccactcttccgaatgcttcttctggtacaaactcctgtaaactcgtttcccaaatgagtccaaatatcatcatgccaaatccttcaattgccattaagaatattaaagcgggtgcccaagaaatgaatggcataattaataaagcaatgccactcattaaaacacctccataagccagtaatcctctcttatgccaccgctctttcccaccaaatattactgcggcaattatagccccaccaccagaaaaggccatgccaagcccatacacgtaagcttcaaaatgatgatgaacattaaataaccatggaattaatacgacgataatgccggcataacaaatatttataaaagaaaaaactaaaattgtaatccacagccacggatgactttttaaaactaaaacaccttccataaactcttgtttgtaagtaagcttactcttttcaatgggttttacttttttaaacttaatttcttttaaaaataataaacataaaaatgataataagtacgttgctgcatctagtccgaaacctatccctgcagatgcaaccgatacgattaacccaccaagtgctggcccaatcaatcgtataccttgattactcatttgagtgagtgcgttagctgcattacgaatttcaggaacgaatactttcgcccttacagcagaatatgctggttggaatatcccttccataagtccgtatatggcaacgagaatatataaaatcgtaattgttaataaatccataaatataagcgatgcaagtaatagcattaatatacagcggattatatccgtaaataacattaatttaacccgatcaattcggtctacaactaaacctgcaaacggtaaagcaagaatattaggtagcatgtacattgccatcgtcatccccattacaactgttgagccagttaatgaatacacaacaactggaagtatgaccatagttatcgaactacctaaggccgagagtaattgtccaatccataaaaacttaaagtgcgttgatactttaactggtaataataattttccaatataacttaaacttttctccttttgtatttccccttgcatgtctctctcctcttttcaaatgactatagaatacataatatacgactgaaaattcataatattatatttccaattatataagaaaccattatgttatggtaaaattatcaaaaaaatataaaggagaatgcatcattatgcctccaaattcacataacatcgaacaccaaatctatacaatgtgtatgatccagcgcaacaatgaagttttactcgtaaaacgacccaatcatcgaggtttccctggctacatagctcctggcggcaaagtagattttcccgaaagtatcgttcaagccgctataagggaagtaaaagaagaaaccggattacttgtttcggatttaaattttaagggattagatgaatatgtaaatccgaaagggaatgttcggtacatggtatttaactactggacagactcatttgaaggtgaacttcttttaaacccacctgagggcaaattattatggataccaatcgatacagcactaaagcttcctatgcaagattggtttaaagaaagattcccattattttttgaaaaaggcacctttgaaattcaacgtgtttgggataatgagctagataaacaagttgctataacaattacacatacgtaaaaaagcttggaatctctccaagcttttcttacttctcctgtactttcttaatcttataatcaatttctaaaaacttaactccaaatatccacattctatgattagcttctagtatgtgatccgtgcgctcttttataataaaagtctctgctaacggtaaacggattgtcaagaaccgagtatgtaaataaatcccctcatctccctgaccattttctcttaacttactagtaataattaaatcatgactatcattatatagtttcaaaataccagtcatattcgaataaggtaaaggtaaggcgatattcatatatgtctcactcttatttgtatgctttgaataaagagctacaaaaatagatttacctgcttcattttttcttagccaagcccttacattctctcttccatctttctcatctatgacactaatgatagagccatgcatcgtttcccaattgccgcccattcctaaatgtatttgttctacacgcttactcattttctcatagcaaagtgcgaacggacggaaccaacgagcccatttaatattcgattgcaattcatactctactgtattttcataaaaatgaataatacttaaaggaaccttcgtcacatcaaatgcctcactatgaaagtcatttactttatcaactaaaccgttgtattccttactgtctactaaattgctgctatataaataagcctcaccaattgccacatttcctcttaacttactcattggtttcccatagtatttataattcggaacactcttttcaatcacccagccgataaatgccggtaacgctactccaattccgttgacaacaccatgaatccaaaccatttgagcaattgtaatcgtcaagacatgcttcaaattcccgtatgaatatataagtgagaacataattgtaaccatgagtgtactagacgaaacgattagaagaatctttgcactgatagcattaaattttgctctccaaacgtaaaatccatacccataaattgcacataaatataggaacactgcaaaaaattcaaatattcttgagtatgtaattcctattgcaactgtcataggtgaaatcatgatgataaacataatagcatcatacactttacttctcttttctctttttctccctattaaaccagctgataatggcaatagaaacgccgaataatgaaaatgtgcagctgtgagtaaaacaatgtcagagctaaaatgcataattgaaagttttgctactgaagcagaaaaccaaaaaccacctaaaaacaaataaataaacgcactatctatggcgatctcttctaacggcttccatcctctttctagcaatctacttacaccaaataacgcaacaattcctgtatatacaaaccaaactagcgcaaataaatagtgatttgtgacgaaagctaacattgcacaaattgctgcgattggatataaaaatgatacggatttataaaataataattgcgatccatctctttttcttttatcaataatacaaaatgacattggtataaataataaaacagataataatataattgcttcaacaggatttatattcgaccactcacttattagaaaaacaacatagcaagcaagcccaaatattatatttttcatatcgtctattccctttccacaaatgttcccttatatgaaaaaagcgaaccaattaacgggtttcgtacttgtacatgaattcgaaaacattgtagtgtttcatcataactttcaacaatttttgcctcaccatacaaaaattttggtaacggcatttttcttccaaacatataaaaccattgtttctttgaagaaatatgcattgcccctaactcatcgatatgaaaatgcagtgtagaaacgagtaaatgtggttcaccaaaataatctacaatttcattttcgttttcatcaaactgcataactgcattaaaatatcttttcttatttcacctattgattccccttctccaactatttcaagcccaaatccaatctttgttttatacaaaaacttctgtggttccccttcttttttctctaaatacgaaatttcagtaaagcgagcatcccactctgtatgtatatctggttcttgcgtatattcccataatttttccatcgtcgtgttcatttttgtcgcaacataaataggctgtttccttttcattctccccacctcctatgcactataactttaatgtacatgcaatgaatttattttgctacatttttcacaaacttcctcagaaaaaagaaagaatttttaaaatatatataaaacacttgattccacgaaaaatttaaattattataaaacaaatgttaccaacaacttcataaatcaaacactctcgcctaaaacgtgagatagaggttgcgatacttatgagtattctaatggagacacagagatgtctatgaacttagatgaaaggaagtattgccgaaattgataaatttctctgcatttatcaattggggctgttttcgaatagaaacagaactgtcatatgtacagacgtgtacgtatgaagagctatctacaaaaaagagatatcatttttttatgatattccttttttggcggtttttttattagctccgttttctgtttcccttttcctgtaacagcaccatcctcacttatttgagatggtgttttttgtttgtctttctggtaactacaggagtattggggatttatatatttcctaatctattcttaaaaatagacgaaagaaggaatttgtaatggaaacaattgttcaaaaatttggtggcacttctgtcggaagcgtcgaacgcattcaacatgtagcaaatttaattattgaagaatatgaacgaggtcatagcattgtctctgtcgtttcagcaatgggaaaaagcacagatgaacttgtcgcactcgctaacgctatcacagaaaatccaagtaaacgtgaaatggatatgcttctatctacaggagaacaagtaactatttcattattaacaatggcactgcaagcaaaaggctatcatgcaatttcattaacagggtggcaagcaggtattacgacagaatctgtacatagtagtgcacggattactgacattcatacagatcgtattcaatcttatcttgctgaaggtacgattgttatcgtagctggtttccaaggtataagtgtagaaaatgaaattacaacgcttggccgtggtggctctgatacgactgctgtcgcattagctgctgcacttaaagcaaaaaaatgtgatatttatacggatgtgacaggtgtatatacgacggacccacgagttgtaaaagatgcttacaaattagacgaaatttcttatgacgaaatgttagagcttgctaatctcggtgctggcgtattacacccgcgcgctgttgagtttgctaaaaatcataatgtagttttagaagttcgctcaagtatggaacaagaaaacggaacaattgtaaaaggagaatgtaacatggaacaacaatcaatcgttaaaggtattgcatttgaggataacattacacgtgtcacaattaaaggattagaacaaggctcgctttcaacagttttctctacattagcagcagcacacattaatgtagatatcatcattcaaagtattacaaatgaaggaactgtacacctctccttctccattcattcgaatgatttaagagaaactttagaagttttggaacaaaatcaagaaactcttcactatgaatctgtagaacatgaaaatcacttagcaaaagtatcaatcgtaggatctggcatggtatctaacccaggtgtcgctgcaaatatgttcactactttaaaagaagaagatattcatattaaaatggtaagtacatcagaaattaaagtgtctgtcgttattgaccgccttcatttagtaacaggcgttgaggcgctgcatcaatcatttatggcgaaaattgagcctttagtgcaaatgagctaatctgatatatttagtaatgctaaaaaaatcatattaatgtattaccttcctattaaataaaaagctgttcgttaacacgatgctatatgacatattaaaaaacaccttgtcacattttcctatactgtgacaaggtgtttttgactgaaaggaatttgtaactacttagtagtataattatgaggataattaaataatagacttttatacataaggagataagactatggcaaaaaacaaattactacgaatggacaatgtcagcatcgttgtagaatcccttgataacgcaatctctttctttgaggagattggcttgaatctcgaaggtcgagccaatgtcgaaggtgaatgggctggtcgcgtaactggactcggttctcagtgcgtagagatcgctatgatggtcactccagatggccacagccgaattgaactttcgcgatttctcaccccacctactatatcagataaccgaaatgctcctgtaaacgccctcggttatctacgcgtcatgttcaccgttgaagacattgacgaaatggtatcgagactcactaagcatggtgcagagctcgttggtgaagtagttcagtatgagaactcgtatcgtctctgctacattcgtggagtcgaaggaattttaatcggtttagcggaagaactcggtaataaataagtaatattttataagaagtctttactaaagtaaaaatatttgaaagaaattctcgcttcataaaacttagattttgaaccccgtcctagctttagaacggggttatgcttgtttgaactttttaacacactatcaacatcctaaaatcattataaaacaattcaattacttcttatactctttcctaggaaatataactgattcttctcacctcttatcatatatatcttttcttttaaaaaacgatctgaactcattcaaaataactttcttcacgtcagagtaaaaaactatcatgaatagtgctattcctaataagatttcttgcattccttcataatcaacgaaagcacttaaaattagcaaaccacatccaatataaaaaccaaattcatttcctttctcaaaatcctcatcttctgcatcactatgtattttctttttgaaatcttgattcccttttatcaactcatctagcgtaacattatacatttcgctcagtaaaattaaattatcaatatcaggataacttttatcattttcccatttatatatcgcttgcctcgttacaccaatctttttagcaacatcctcttgtgaaaatccctttgactctcgtagtttttttaactgttctcctaaattcataacgtcccctcctttaacaaattattacataaaaagagatataaaagaaagaaaccattagtaaaattcactgtaaaccattcgtttacacaataaaaagagaggataactctttgagctactggtattatcccctataggtagaaagtaaaaaaagagtccatctgatatgatggactcaatactgttttatctggaggggaaaatgtacatatttattcaagcgttaatgtacatatttaagttagcatttatagacggtgtagaagatacaattcaaaaaaagaaaatagcatataaagttcaagattatgatggggaaaacttgcgattatttaatgagacgtcatttaatacaattaagtatgtgaagcaaagttaaagttatgaaggactaggtttaaatggcctagtccttcattaaagtgcgagtatgtaaataatatgttatctttcgttctgtttacttagtatcatgttattctttaatagagtaataaatggagttttgcattaaatatatgaggttggttacaaatgataaagaaatttactagattagtattaatagtggttatcccaatcagtcttattacaggttctggggctgctgaaaaaactgaagcacaaaagccgaaagcggtacaaacggagaaaaaggactatatggattactcatatggtagcaaaggtatattagtaagtggcaaagcgaaagaacggcaacaatacgagattggatatatggatgataataagttaattgggattgacgaaaatattgaagactgcattattttagataataaagatgaagcaggtctcatttggaagcaaatagagcgtggatctattattgaagtgcaatacggtaaggatcgcaatgatatcgtaggcgtgcaattcgtaggagatcgtgagtcatatgaaattagtgataagtttgatcggaatacgataaatgagattgttgaaaacgttaaagggaatttgtaatagatgtatttcgatagtataggatctcttattatgaaattgtatgccagttatttgtctaagtttaaattgattattttgacggtatttgtaattagttgtaaaataatgtttgttgacgaattttataaaaagtatgttagatgaaattcatctgtagggatgacatataaatattttcttaatgagtataaaatatgataatttaaatatataaataaaaaagaaaatgtattggaagtacatagtagattcatatttttaaaaattaatgtaacaataaagggaggttgagatacatacacggtgggagtgtgtatgtatttattataataatgaataagacaatcaaacaacaagtaatcgcactatcaacaagtctagtgattttagggagcgtacctttatcagcatcagcagaagagataaacaaatctcaaactgatcaacttaatattgcccaaggagaacacggaacgagcggattaaattattctaatttcaagttggaagttcctgatcatgtacaaattaacgaagcagaagtatctgaaaatgaaaaaatgcttttagaagaatataagcataaacatgatgaaacagaagaattaaacaaaatgcaaaatgctaagaagggacaagtagcagaaaaggaagctatttcaaacattgaaaaggcatttgaatctgtagatggtcgaaatgatggatctgatcgtcaaatgaaacctgttgcaaagccaagaggtattcaatatagtgcacagagtacgaagaaatatggaacacttgcaggagttccatttgtggagtggattgttccagcaggaaatcctgatattcgtcctgcaaatccgatgaaagcacgttacattacaattcatgagaccgcaaatacagccgctggtgctaatgctgaaaatcatgcgaaatatttatacaagcaagcaactgaaggcactttccgaacagcttcatggcattttactgtagacgataaacaaatttatcaacacttaccaacaaacgaaaatggttggcatgcaggagatggagatggatcaggaaacagggagtctatcggtatcgagatcgcggttaaccaagatggtgattacaataaagctttagaaaatgcaaaacgacttgcaggttatttaatgaacaaagaaggaattggtgcagatcatatttacaagcatcaacaatggagcgggaaaaaatgtcctgacattttaatttcacgtggtaattgggctggtttcgtacaaggaattcagtggtatgcaaatataaatgcgcagattgatacgcctttacaagataaaaatgactcatttaatccaaatgaaaataatccagctgaacctagcatggaactagtggtaaatggtagtggtatcaatgtacgtagtgatgcgggtattgaacatcgtgttgtacgtaaagcttcaaacggagatcgttacaaagtattagcggttaaaaatggttggtataaagtaggtaatggagaatggattttctatgacccaagttggattaaaattaactacaatgtaccaaaggaagaagtacaaaagccaaaggaagaagtacaaaaaccaaaagatgatattacaggtggctggtttgaagggcatattcgtaaattaaacagtctaggtattatgcaaggcgaaggtaatggtgtatttgcgccatatcgaaatgtaacgagagcggagtttgcgaaattaatctcgaatgctcttaaactaccagagggaaataagtcatttgtagatattaatgaggcacatccatcacttcatgacggtattaaacgttgtgcaagtgtaggaattattaatggtcgtggtgaagggatttttgatcctaactcaccaattactcgtgaagaagtatctattatgattgacaaagcattacgatataaaggaattacaggtgagttagtagcattaccatttacagataagcatttaataacatacaaagaatcggttcaacgattatacagtctaaaggtagttaatggtattggaaataatgagtttgatccccgaggtacagcaactcgtggtcaggcagctgcctttattgtgaagatgttagattcaatgcaaaaataaaatgaaactttaatcagtgagggccactcgcattgcaatcgagcagtttattcaccgaattttgaaatgagagttgtactgtccgcaaatagcagaataaatggtatgtagaagctgacattggtagaagtaaaaaataagaagaatttgaaaggagctatccaaaataataatttggaatagctcctatttagtaggaagaacaaattgtatttcatagattgtaatgtagaatgcccttccaagccccttataagcccctaccaagtaataaatcactaagaaaaaacaaaaacaaaaacaaaaacaaaaacaaaaacaagaacaaaacaagcgcgaaaaaatgaaaccggcgttgtagtagtaaaaaaattgtaattcgaatgccaaaaccattcccgtatgcctatctttataatgaaggattaaaattttcctatttactagcaaagagtggagggaaacatatggcggtataccgtaatgtgcaggtgaacttttggcaagatgaattcatattagatttaacgccagaggagcgttatttttacatatatttgttaactggtacgaaaacaaagcaatgtggtatttacatattaccgaagcgtgtggcagagcttgaaacaggttatagtatggagactgttgagaagttgctaaacaggtttgttgagtatggaaagattttatatgatacggaaacgaaagaggtattcataataaattggttacactataaccctatttcaaatacgaatgtggagaagtgcgtattacgtgagttaaagactataaaaagtaatgagttcatacatatatttttacgtaaatgccttgaagaagaatacaagattccattattattgcagcattttggtatgccaaaagaagaggataatagtagttcacaagtagttattgaagagaaagaagaagcggaagagatagaggtggaaactatagaagaggacgttccaaatagtgaagtttataagttttatgaacaaaatattagtagtttatccccatatattgtgaaggaattgaagaattggatacaaagactttctggagagaaagtgttagaggtacttaaaattgcgtttgaaaataataagaaaacgttagcttatgtgagggggattttgaggaattggtgtagtgaaaaattaaaggattttagtggggagaagtgcgtaatgggaagtttagagagaaggaaatgtattttgagtagtgtattttaatttacattaacttaacatagaatgtatgttcgtttttgtgaggtttatgctatactaccattaaataagggtatttttataatagataaaaagatgcggggggtacaaagtttgactactagtacatctgagttgtttcaatatattaatatgacagaagaacagaaacaattatcacaacgatatttacagacaaaagaagaagagattttaaaagatattcaactaacgacaattcgtgatcaaaaaagaagcgattttgcggagcgatttataaacgattttaggaaagtgcataaacaagatccggatttttttcgattattttaccatatactcgaggagcaattattaaatgttcttgtagtccgttttgcgcatgtcagtttttctaaaatgaagatttatttagaaaaaagtgcacttcctttggacaaacttgtagcaatcgcatgtaaatatttatccagtatttcaagttatgtgaatgaagcagatgtttttcttagagagttaacaagagagaatccgaactatatagagggacaattacatactttaccaactaaccagcaagtaacattacttcttgtaatgtttgatgtagattatgaaaagtttcgtacatatagttctttattgaatgagaggttagaagaacatacagaatttatattgaaactgctaggggaaaaggaaaaggttgaagcagttaaacggtatttaaaaggtaaagatgatagtgaagtatttataggtgggaatttaccggaacatatttggcggctattattttgtgttcataaatattcgaatgttgcgaggcgatatattgaaatattggcgaagaaaaatgtttggggttttataaactatgcaacacgttatatgtgtcacactctcggtcagtctcaaaactacaaaaaaactggtagtgtaaatagagaaacatatgaagaaattcaaagtttttgtacacagttttggatttctaaggaacgattttttgcgcatcgtctaaggcaacatgatttgaatagtgaggatttttgtaagacgtatgaatatgaattgctatgctttatgttggaggaaaatcctgaatttattcaatgtactttgcaatatgtaagtagaatgaattatctcatcgtcgcacgaacgctagctgaaaaaggatatgagctaaatagagggaaaatgcgagaagaattttttgttgctgctttgcaaattaaattgtctacagtgcggaatacatatcgtgattatttactagggaagttgtcacttgaggatatggagcaaatatttaaaaatccgaaatatagaagtatgtattggggtatgccggtgttagaggttgcgcttctttgggatatagatgatatagcgaagagggaagctgtacttacactacagtttggagatgaagatagtgttaatttatacgaacttctttacgaatgttctgtcagaggagtagaaccgaaacaagtattagaagatctgctttcgtatggattaagtaaggaaaagcttatcgcttatgcagttgaagaagctgcatgctacagtgaagagcgaaataaggcgaaggaagcgcttgtttgtgtaattgtaaaagaacaagcgtacatcattgaacgatttgatgagtattctgctgtggccaaagcatatattttagaagagttagcaaaggataacatgattaaaatgcgtccaattttaattaaaagcttaggagattcatctaaaaaaatgcgtgagtctgtagttgaactgctttcaaaagaggtagaagctgcagcagatgtagcagttgaacttcataataaaaagaaaattgttcgtgaaaatgtgatgaaaatacttatagagtataagcttgaaaaatatacgaaatttgtacaggaagctttgcaagaaagtaaaaatgaatctttcgcaggaaaattctcgtttttatttcaaacggaggaagaaaagatagaagaactatgtgcacgtattttaactgaacaaacaagaaattcacttctgcaattgattggggatgagccacaaatccgtttacgtgactctgatgaaattgctgatgctgcaattccgttagcctatttacaacagtatattttagatgctgttattgagaagaaagaaacagcagaagtaattggtagagctttaaatgaagaggacttaaaagaatatgtgcaaacaatatatcaaatatggatttctcaagacgcagatgtgaagaaacgtggaattctttcgttatacggaatgtatagtgacgacaaaatggtcgacatacttataaagcaaattgatgaatgggtgcttcaaatgagaggaaagatagcagcggatgccgttcgtgctttaggtttgtcttcatctaagcttgcacttatgtctattcatgcaatagcatttaaatataaacataagcaagtacgtaatgcaacaaaagaagcgctaagtcttgctgtgaaaacacgtggtataacagaggaagagctggcagatcaattggtgccggacctcggctttactatacatggtgaaaaaataattgatttcgggaatcgaagttttactgccattttaactacagagtcaaaaattgaattagagacagaagaaggaaaacgtatgaagtcacttccaaagccgaatgcaaaagatgatgtagaaaaggctgaagaggctaaaaaagaattagcctctttaaagaaggaactccgaaatactctttccatgcaaaaacaacgattggaaacggcactttcattaaagcgttattggtcacataatgcatggaagtctgtatttatggataatccaattatgaagcaattttctatttcactcatttggggtgagtataaggaagggaagttgctgaaggcattccgttatgcagaaggtggcgtgttctgtacaattgacgggaagagttatgaactttcatctggcactgttattggtttcgttcatccgttagaattgtctggggcggagaaggaattatggaaagagcaattagaaagtgcgggaattgttcagccgttcctacaaattgagcgtccagtgtttgtagtagaagagaatgatgagagtgctattgagagatttggcggtattttactaaatggtcgttcgttattcggtaagatgacgaagcttggatggatccgtgggtctgttcaagatggcggtgtatattatacattttacaaagaagatactcgtaccggattaggagtgcaattgtcatttagcggagcaccgattggttatgaagatgaagaagatgtatgtgtatttgacattcaattttataaagcaggtacagtgaatcgtggttcatatgaatacgatgagattgatgatgaaagacgcattgtaccaaaagaagtagataaacgcttctttagtgaaatgttatatgatgtgcaagtagcgacagattcaaatcttgggcataatgaaagttggcgtagcgaacgataagaaaaaccccttcattggtaggaaaatgaagggggtttttcaatgtttcaaaaggttctttcataatagaagcgaattagggggaagaggatttttatccttttagaagggattggtatcatgatcaaatagatgatttatcatacgactacactgaatacagcgggaatagaagggaaaatgttaacgttacagccacggtaatgatagaaaagacttttactatatgtaagagtctctttttttgtaaacgcgacaaaatttgacaaaaaaatttgtaggaacttgttataatttctgttggaatattttgtttaacgagaaatgggtgtatagcgtaaaagatttcggtgtcatacaaatacattttttgttttacattcaaggatttcataagagaagaattacaaaaatgaatgacatggagaagtcatagggggagaggagatttagcatgagtattaaagtaataagagcaacaggggtaatgggaggagcagcaagagttgctgtaaaggtagataacgaagtagtaatgaaacttgagaataacgaagaatatacgcttccttttgaattagatgaagcgaatattaaagtaaaacaattcttttttggaagtaaagaaaagaaagtaaaggatggcgatgtagtagaaattaagataaatagtattgctatgctattactgatggtgtcaatgatggctgttttatttggttcgtcaattggtataaatattgttgtttttggtgtgataggagctttagttacattagtatacggattgaataactggtttcgtttagaggttaaataattattgtatatatatttatttcagttgatttactatacatgggatgaaaatatttttaagtgggaaatggggagaatcagtatgaagaaaatggttgtaatatctagtttggcgctaatagtaggtttaacaactggttgtagcagtgaaaaaacaagtggacctaaaacagtatctgtaaaaaaagaaaaagagttagtagcgaaagatatttttaaaaaagcagctgacggattaaaacaagaggaatatcttacattgacatctcttatgtcaatgaaggggagcggccaatcagaagaaattaaaatgaaaatacaaatggagccgaaactgaagaattctagggctgaaatgaaaataagtggtacagatattgtaacgtatgaagtagatggaaaggtcgctgctcaagtgaaaacccctgatacaggagagttagttacgatacctaataatcaatttaatgtaaatgatgtaatggtcagtaaaaatttacttaatgagttagatttaccggaagctttggctaagaaaatgaaagcaaagaaagatggagacacatataaacttacacttgaattaaagggaaaagaagcggtagatacgttacaaaaaattaatggagatatgaaaaaattaacggaaggatttaatatggatgcgtttaacattgaatatataataacaaaagattataaatttgaagagatgcgaacaactataaaagtgagtgaaagtaactcagataaaaaagctagtacagataaggaaaaattggatgcagttgtgagtataaagattgattcatatgaaaagtttgattcaattaagttaccagaagggattcaataatttcaatcgtaaaaggataaaaaggagcggaaatctgctccttttttatttttcctactatttttagaagatttatatgaatatagttgaacggcacttcatttttttctggaataaatgtgaaacgttgtataaaataatcaagaaaggcaaaaattatagggggaaagttgtgaagaaaaataagagtttaataagttttttaggagtgtttattatgttgttttctttttgttttcaaggaaatgtacaggcagatgtaaatactgttcaatctggaaaaatcaaatcaggaaacgtaacagtatgggaagttggaaatgtagcgaaagtattagcggatgtggagcgcttaaatttaaatacagtaaatgtaccgattcaagtagatatcccaaatgtgacttctactaacatggtaattaatcaagcgcaaaagcaacaagctattattttaattcaagaattattaaagcgtaatattcaagttatagtggaaccgttcccatatattcagcaggggaatgttggagagacagaatggaacccaagtaacattaatgatttcttctggaattggaagacggttattctgcaagatatttttaattccattacaagtaaatacaatgtgtatggactaaagattgcttctaatttcgtgaatatggagtatgcagaaggatactggagcgatacaattgattttgttcgtaatcagtataaaggaaatgttttgtatcaaatgaactggtggttaacagcaagctgggatccttcttatgaagcgaagtttaaagagaaaatcaatcgcccgtatttaaaaaagatggatattgttagcatagacagttggtttgaagtttcaggaaaaagaaatccaacatatgaagaagtgaagcaaagtttatttgcgacaacagtatataatcgtgggcaaaatgttgttcagcaattggaacaattacataatgcaacaggaaagccagtttacttcggtggatttaacgttccagcacgtgaacttggattacaaaatccatggaatccagatgtttcaaatgtgttttcgaaagatgtacaattaaatggatggcgtgcttaccgagatgtattagaaccgaaaccatattttaaaggtttttcaatttggtttattggctctaatgatagtacacatgcgtatcaaatacatagtaaagaagcagagacagttattaacgggtggtaccgaaaataatttttataaaataggtaagttttaaagtttactacatatatttttagtgaaaggcctttcaccatcttatcacctagggggcaatcataatgaaatttttgtcttaccttacagtaattttggtgattcttggcggtttgaattggttattggtagcgttagattacaatgtagttgagaaatggtttggttctatgccggcgcttgtggacactatttattggctcattggtctttctgctatttatcaaatttttgatcggttctttacgaacgactagctattattctttcattattagagtgttaagtacgattatgtacttaacacttttttatatgtccataaaaaagtctgcacttgcaagcgattccatcgcgtcttgcgccataataatagaaaacaaattgaccgtatattatattttaggttataattcagaaagtttaaaaatatccaaataagaaatagggaggttatgagggtaatggagagagtctataatttttcagcagggccatcaatactccctttgccagttttagagaaagtgcaaaaggagcttttaaattataacgggacaggcatgtctattatggaaatgagtcatcgatcttcttattttcaaagtattatagaggaagcgagtaacttacttcgtgaattaatgagcattcctgatgagtatgatgttttatttttacaaggcggtgcgtcattacaattttctatgataccactgaacttaatgaatacgtataaaaaagctggatacgtactaactggctcatggtctaaaaaggcactgcaagaagccgaaaaagttggggaagtacaagtgattgcttcttccgagcaagagaagtttactacgattcctaaactggacggtttactaagcgatgaaaaactagattatgtacatattacaacgaataatacaattgaggggacaaaatatgtggatattccacatatagaaagagtgccgctcgttgcggatatgtcttcaaatattttgtcagaacaatatgatgtttcgaagtttggtcttatatacgcgggagcacaaaaaaatttaggaccagcgggcttaacgattgctattataaaaagagatttaattgggggagcagatcgctcttgtccgacaatgttaaattatgaaacttacagtaaaaataactccttatataatacaccgccatcctttagtatttacgtaacaaaacttgtactagagtggttgaaagagcaaggcggagtatctgcgattgaagaacaaaatagaatgaaatcttcacttatttatcattttttagatgaatctaaattgtttacttcaccagttgatcctgcgtatcgatcacttatgaacattccatttacaacaccgtcagaagaacttaacaatgagtttttacaaaaagcgaaggaacgcggccttgttacgttaaaaggacatcgctcagttggcggtatgcgtgccagtatttacaatgcgatgccagcacacggcgtaaaacgattagtagattatatgaaggaatttgagcttgagaatagatagggagatggggatatgtttcgtgttcaaacgttaaatcaaattgcagaaaaaggtttgcaagtttttactgaagaacgttatgtagtaggagatagaatcaatcatccagatggaattttgcttcgtagctactctttacatcaagaagagttttcaaaagacttaaaggcgattgcaagagctggcgctggtgtaaataatattcctgtcgagcgatgtacagaaaaaggaattgtagtatttaacacgccgggggcaaatgctaatgcagtaaaggaactcattattgccagtcttattatgtcttcacgcaacattattaatggtgtaagttggacgaaaaacttagagggtgaagaagtaccacagcttgttgaatcaggaaaaaaacaatttgttggatcagaaattgcagggaaacgtctaggtgttatcggacttggcgcaatcggtgctttagttgcgaacgatgcgttagcgttaggcatggatgttatcggatatgatccttatatttcagttgaaacagcttggcgtctttctacacatgtgcaaagagcatttagccttgatgaaatttttgcaacgtgtgattatattacactgcatattcctcttacgaatcaaacgaaggggatcattggggaacacgctgtagagaagatgaaaagagggatgcgtctatttaatttctctagaggagaacttgtagatgaaaaggttcttcaaaaagcattagaagaagatattattacacattacgtaacggatttcccgaatgaaaatgtaataaagatgaaaaatgtaacagcgacgcctcaccttggcgcatcaacgtctgaatcggaagaaaattgtgcagtaatggcggcgcgtcaattacgtgaatatttagagacaggaaatattcgtaactcagtaaattatccaaacgtagaattgccgtatatcggaaagaaacgaattacaattatgcatcaaaacgtcccgaatatggtagggcaaattacaggatgcttagcggaacatcatattaatattgccgatatgattaatcgtagtaaacattcttgggcatacacaatgattgatatcgataacggaattgatgatataataaaagagaatattgtagaaaatataagcaaaattacaggtgttgtagccgttcgaatgattgtgtaaaggagagaggaatgtggcaaaaatacgaccgtttcgggccattcgtccagtagaggaaaaagcggcacaagtggcagctttaccgtatgacgtattaaatagtgaagaggcaagggaagttgtaaaagggaatccatattctttcttgcatgttgataaagcagaaattgatttagatcctgaattgtcaccgtatgatgatcgcgtgtatgaaaaagcgggcgacaatttaaagcaatttatacgagaagaagtgttcatacaagatgaagagccagcgctatatatttatgaactgacgatgcaaggaagaacgcagtcaggccttgtcgtttgtacatctattgatgagtatgaagatgatacaattaaaaaacatgaaagaacacgtcatgaaaaagaactagatcgtattcgccacgtagatgtgtgtgacgcaaatacaggtccgatatttttaacttaccgtacaaaagatgaagtaaagcatttaattagaagctggaaagaagagcatgcgccaatttatacatttacagcagaagacggtgttaagcatgttgcgtggaagattgcagatgaagatgtaattacgactttagtaaacgcatttgaagatattcctaatctttatattgcagatgggcatcaccgttctgcatcagctgcaaaagtaggacttatgagaagagaacaatatccaaattacacaggagaagaggaatttaatttcttcttatcggttctattccctcatgatgaattatcgatttgggactataaccgagttgtgaaagatttaaacggtttatcagaagaacagtttttaaaacaaatcaagcaatacttctatgtagaagaagcacctgtttctccgtataaaccaaatgaaccaaaagcatttggaatgtatgtaaatgagaagtggtataagcttactgtgaaagaagaaacatttgatgcgaatgatcttgttagaggtttagatgtatctatcctgcaagatcatttattaagccaagtacttgaaatacatgatccgcgttctgattcacgcattgattttgttggcggaatacgggggctagaagaactagaacgccttgtgaacagcggcgaatacaaagcagcattcgcattatatccgacatctatggaagatttattagcaatcgcagatgccggagaagtcatgccgccgaaatcaacgtggtttgaaccgaaactgcgtagtgggttgtttgttcattctttaaagtaaatattgacttctatagttttgaaaaaccgaaatgatttgagtttcggtttttcttattttacaagtgtttttgaggagggggatcgatgaaattgcaagtaggcgaaaaaattacctttgaaagaacgtttacaaaagaagatgttgcgttatttacggaagtatcgaaagatgaaggtgttcatcatgttacaccagatgagcaggggagatttgttgtacaagggcttttaacatcaacactacctacaaaaattggcggtgattataacgtactagctcgcaagatggattttgaatttttacgtcctgtgtttagtggtgacacaattcgttgtgacttaaccatagaacaatttgaacccgatgaaaaaaatcgtacaaatattactgcgatgtttatatgtaggaatcaacttgaaaaggaagttatgaaggggagtttttctgggattattctttagttagtaggaaaagtaatgaataggtgggggccatgtcactcgggcttaggtttttaattccaccataacgaaaatgatatgcattgctgtatattgataatatactctgttcatttttaatttgaataagctcgtcaacaaaaaggacattccgagtattacaagaaatgtcctttctgctaaaatgtaaggtattttgctaaaattcaaactctaaaatcagtttactagtttgacctgtaaactgataattataggaccctctcagattttctaagttaccggtagctttaataattgttcctggggaatctaaatttcctttatcaaatattccttgctctatagctgtgaatgtcccttgttgccccttataaattccttcaaagtgtaaaaatccagaaattttagccgtagccaagtgaccatcatttatatttgagtctagataatataataagtattcaacaaaagcttttccttttaattctccatcaatatcatattcaacatgggcaatattaatagggaaatcttttctagtatcatcaattagtttttcatcccatttacttactgtaaatgttacttccatacacgtaaatccccctttatcattagataagtaatctccatatcatttaaaaagtactaattcacagtcatatcttataggagtgtttttatttatttgagccctgtcatatcgttatcttatctcagaatcacctgcgcctccccatgaaggacttactgttgtcacggtgtctcctgcttgtaacctctttggttttattaacatgttaactccgctgctacagaatgtaatggattacgattatacaaactgtatcattgaaatacatgatgtatgacattagtttcttcatcatcaatccgtttacctgctgggattcaagaattcagtcttagtgttgaatataggaataacctatttatatttgaaaatcaaagtatgcaacattgcatgaggaaaacggttgttattttcactacctgtaactataatgattacaggttggtcgataccaatcaaaaaaataaaatcatcgtgaatggagatgtttcataatgggtatgaaaaaattaattttagcaggtgctttagggatcgcagcattatcaggaacaaatttaccaggactagaagtaacaaaagcgagtgcagcttctattgaatcgaatttctcgacgttagaaggacgagtagtagaagtagataacggtgtaattgttgtaaaatctaagcaatatgaggaaccggttagtgtgtatattgattcactttcaaatgtgaaagtaggagatgaagtaaaagctactggatctatgatgcgtaattttacagaatatatggttgcaactgcagttgaaaatacaacaaacaagttaggtatgcacatgaaagaagatggctcacctaattatgtaattggagaagtatcaaaagtaggaacgatggaagatgagggagacggtgctactaaatatgttgtagttgagtatccatcgttaaatgggaagaaagctattattgatgttttcttaacaaagggacaagtatttaatgcgggtgagaaagtgaaaattgatatgaagtatgtagggtggggcggaagttctattaactggaacacagttgaccatattgaaaaagttcatgaagcaaagacgaacgctgaaaataatgatggtgtatggatttggtcttaattaaaatcctgtaaataacaaatgtatcatgtagtatccagcaaatggtgatgtgtatgaccatttgctggatacttttttgctttgtattttattgagaataagggatatccgactagaatatgatgtttaaatcggtgcgagttaaaaaatacaataatgaaagaggggtttatatatggagcgagatgagaattatttacgagctaaaaaaagagtggagaatttaaaagcgttttacattcatttaacggtctatatattagttaacttaatgctttttttcataaatataagctctgattcaagtaaattatggtttttatatccacttggaggttgggggattggtatcgttatacatggtttaacaacttttccatttgggatattcggaaaagaatgggaagaacgaaaaattaaagagtatatggagaaagataagtgaaaaaatcagagatttatgaatataaatctctgtgagcacacgtttgatgcgaagcctattctatagcttcgcctatttgttttgtactcgaagttaatgcgagtacgtgttcctattcatttttagcatgaattgcatgtgaaatcaaaactttagttgtagtacataataaatacagttattttactttcttaattacaagtggatataggataaagttgatttatcatcctatattaaaataaaaaacaaaccactgttcgatttgaatattccacgatataatggtgagagtttatgacagaataaatatttacataagaagtgaggtactgtatgaaaaaaagaacgacagacattatttttattattattggtgcatttctttttgctttaggtgtcaatttatttgttatcccgaacgagtttggtgagggtggggtaacaggtatcacgattattacgtactatttatttgaatggtcaccaggtttagttaacttaattttaaatgcgattttgttaatagtcggttataaatttttaaataaaatcacaacaatttatacgattatcgctgtagtgactaactcgctatttcttcatttaacagaaggctggacgattgcttcggatgaaatgcttgtaaatgccattttcggaggaatatttatcgggtgtggtattggtcttatcattcgcgttggcggaacaactgcaggtactacgatcttagcaaggatgacacataaatatttaggctggagcattagctacggtctactgttcttcgatttaatcgttgcattttcatcttatttcatcattggtgcagaaaaactgatgataacaattattatgctatatgtagcaacgaaagtgatggaatttgtaattgaagggttaaatccgaagaaggctattacgattatttctgataatccagatgaaattgccgggaaggtgacaaccttaatggggagaggggttaccgtgtattcaggtcatggctattacacgaaaacgccgaaggaaattctttatgttgttattaataagcaagaagtagtgaagctaaagcggattgttcaaactacggatccggcggcgttcatcgctatacacgatgttcgtgatgtgttcggagaaggatttgttgatatttcgaaggcttagaaattgtttttgattaaaataatcttaatactaaaacgtaagaatctattttgaataatcttttttcaaaatagattctttttctttttcttgcaaaaaatccaattgtttcttaatgtagtgatgtagaaggatgaacgagagagggtttaatgaagatgatacatattttattagctgatgatgataagcatattagagagttgttgcattatcatttacaaaaagaggggtttaaagtttttgaagcagaagatggaaaggtagcgcaagatgttttagagaaggaaaatattcatcttgcgatcgtagacattatgatgccgttcgttgatggctatacgttatgtgaagaaatccggaagtatcatgatataccggttattttattaacggcgaaagatcagttagttgataaagaaaaaggattcatttctggtacggacgattatatcgtaaaaccatttgaaccagctgaagtgattttccgtatgaaagctttattacgacgttatcaaatgctgagtgcagatattattacgttgcacggaacgacaattgatcgaaaaggtgtagaagtaaagtgtaacggtcaaacaattttgcttcctttaaaggaatttgagttattatcacaacttgctagttatcctggaagaacattttcaagagaagagctaattgaattagtatggggaatggattttgaaggagatgaacgaacagttgatgttcatgtgaaaaggctgcgagatcgtttctcaaaacgaacggatgattttcaaattacaacagtgcgcggcctcgggtataagttggagttgaaataagatgaaatcactatattctagatttgtatttatgacggtcggcattatgctacttagtagtattatcggctttttattaacgaacgtatattatcaagtgaagttaaaaccatataacagtgaaaagattttaaagtatgcggaagaagttaaatcgttatatgaaaagcaaagtgaagaaaatcaagagacgtatttgcattctattgcaaaattagggtatgagatttacattgttgatgatcaaaagaatggaaagcgtatcggtaatgcgtttcgtaagacgacaataagtgatgataccgttcataaagtattgcagggggagacatttaatggtgtttctacttatccaacgcgcctctttattacaggttttttcgataatgaattaattaatagcgtcggtgtcccagtacaacacggtgataaacagtacgctttattcattcgccctgacgttcaacaacaattcggcgagatgagaatttttctagcggtattattagggtttatcgtactattaagtattatttttatagcgattgcagcaggttacatcgttcgcccaatccgtaaatttacgaaggctacgcaaaaaattgcgagtggggaatatgaaattgaattagatgtaaaacgaaaagatgaaataggaacgttatctacaagcttccaaaagatgacgaagagtattaaagaactagatgaaatgagacaagaattcgtttcgaacgtttcacatgaatttcagtcgccactttcttccatacaaggtttttcaaagacgttgcaaacagaaaagatgagtgaggaagaaagaaatcattacttacaaattattgagggtgaaagtaagcgaatgtctagtttatgtaaacagttacttacgctcgcttcattagataaagaggaaaaggttctacaaataagagaattcaatctgcagaagcaaattaaagacgtcatttttatgcttgagtggaaatggcgggaaaaagatatcgccgttgaatttaatgtgccagatatcactataaaaggtgatgaaaacttacttcatcaagtttggagtaacattttcacgaatagcattaagttttcaaacgatggtggaacgattgagtttttcgtcgaagagttagagtctagtgtcattatttctatatcagacaacggaatcggtatggaaaaagaagaaatggatcgtatttttgaccgtttttacaaagtagatacagcaaggacgagaaacgtagaaggtagcggtttaggattgtcgattgtgcagaagattgttgaactgcatcatggaaacgtttcggtgtatagtacgaagggggaaggaacgaccgttcgggtggagcttccgaaatagatggaaagaaagaggctgtttcggaactgcctcttttttgtcgttttatgtcggcaagtcgatataatcggaaaatcgctgatataatttgagctgcgccgatataattctatttgcgctgatatatttgaaaaatcgctgatataaatttcacgtactgtatttctgctataaagccacacctttcccgcgctcaaaaagtatcagatgtaatttaatttcccctctgtaatcttctgttcatattccgttcatatttcttttttatgataagtgcatagaaagaaagaggaaggagcgagcgaaatgtttttagctctgcgtgaattgaaacaatcaaaattaagatacggattaatcggactgattatggtgttattatcatttttagttcttgttatttcaggattagcaaatggactatcatatgataatgcttcatcgattcaaaatatggaggcaaataagttcgttttagcagatgatgcggaaaataaattacttcgttcacaaattaagaaagacgatgtagataacgtagtaaatcaagtaggcgagaaagaagccgttccgtttcgtgtgaaagtttcaacatatgaaaagaaagatagttcgaaaaaggttgatatcgctattttctcaagtgaacgtgattcatttttagaaccaaaaattgtaaaaggtgagaaattaggtacagcaaataacgaaatggttgctgacgaatcaattaaagaaaaaggaattgatattggagatacaattattgatcctgtttcaaagaaagaatttacaatcgttggatttacgaaagatcaaatgtttagccatacaccagttgtgtatgtaaatgaagacgtatggggatctatttcacaaccaaatcaaaaagattatagtgcaattgcgctgaatacagataaagaaatcaaaaatgcacatgttatcgacaaaaaagaagtactgcaaagtattccaggatttaaagaagagcaaggaacattgacgatgatcattgcattcttacttgttatcgctgcgttattaatcggtgtattcttctacgttattacactgcaaaaaacacagcaattaggcgtattaaaagcaattggtacgaagaactcttatttagcaaatagcttagtcgtacaggcgttattcttatcagtcgttgcgatggtaataagtattgttcttgtacaagggttagaacaaattttaccagctggtatgccattcttattaacaacaccgatgattgcacaatatgcggcaatctttatcgttattagtattttaggaacacttatttcgttatatcaagtattaaaagttgatgcattagaagcaattggaggcgggatgtaatgacttcattattaaaattagacaaagtaagtaaagtgtacggagaaggaaatacggaagtaacagcccttcatccgatgtcgcttgatgtgaaagctggagagtttatcggaatcgttggtccttctggatcagggaaaagtacgttattatcaattgctggtgctttattatcaccgtcaaaaggggatatttacattcgcgagcaaaatattacgaagctatcagaaaaggaaatgacagacattcgtttgaaaaaaatcggcttcattttccagtttgcaaaccttgttccatatttaaatgtgaaagaacagttactttacattgcaaagctaaaaaaagaaagtaaacaagaatccggaaagcgtgcagatcatttattagcggcatttggattaggagaaagaaagaatcattatccaaatcaactatctggcggggaaaaacaaagggtagcaatcgctcgtgcgttcatgaacaacccagatttaatattagcggatgagccaacggcaagcttagactcaaaacgcgcacgtgaagttgttgaaatgatgaaacgcgaagtgaaagagagccaaaaagcagcaattatgattacacatgatgaaagaatgcttgatgtatgtgatcgtatattgacgcttcgagatggacagttaatataaaaaaaggaaaaccgtacatgtatgtgcggttttcctttttttatggacttatttagagaataacgttttaattttattacgagtaagtaataaaacaccgcctaatacagatagcattcctagagccatattgtttgattgctcgctaccagcgttaggaagttctttagcgttattgtttttagtaccattatctgcttgcgtttgtttagactgtgatacttcattaatcttgttgtcaacattttgcttcgttgtatgtaactcagctaatttgtcgtcaatttttttctcagtatgcttaaagtcgttgattttaatatctaagtcttgttttttctttgataaatcatctgaaacagtttgtttcgattgtttaatttcgttaattttattaattaaatcttgtctagcttcttgtaaaacagctagtttgttttttacatcttgtttagctaattctaagttagcggaaagactgtctaaattgcctttaattttcttaagttcctctaacgtgttaccggtattcggcttgttttcttttagttcagcgagtttgtcctcagcagtttgtttcgctttttttaactcagctaatttttcatctacttgttttttaacttccttaagttcattaaccttttgatcaatgttctctttatgttgcttcatttcattcactttttcatcgacagtttgtttatgttctttaatctcattcactttgttatcgatattttgcttatgttcttttacttcagcaactttatcttctacttgttttttatgctctttaatttcagcgattttatcttcggcaatttgtttgtcttgctgcagttttgcatctagttcttgtttatgctgtttaacttcgttaattttttcatcagcaacttgtttacgttcatgtagttcattcaccttcgtatcaacattttccttaactttgttaagttcgtttaatgtttgatccacgttttctttttgttgctgtaatttcgcatctaactcttgtttatgttgcttaatttcagctaatcgatctcctgtactttgctggggagtagtatcatttacttccgcatgagcagagttcgcgccagcaatcattgctaaagctagtgtagacgcagcgattgtttgttttgttttcatatttttgtacctcttttctttcatatgcatgagctgttttgtgtaaaattgagcatatagaagtagattcttccatcattatataccatctgcgctgcctagaggaagtatttgcataataatctatgattatgtaatttttataatctcttattttggagtaggggataaatctttagctagatgaacaatttcttcaatagtaaagcttatatctttattattgcgaataacaaacaaataatcagcctcattttctataggatctaccacatcatcgtgaagtgattcagtttgttgttgatcaaatacttctttgaaactagaatatccacctctaaaaatattggtacttcgcgtgcttcgagccactctttcgtaaagtacatcatctggaatgtcaaaatgaacgagtatgcgtacatattcattctgtggaaataattcgtttagtaaatataaccttccatttttactgcgattggagttactaataataaggtgtaaatttgtatgttctttcgcataatcaacaatgaatttagaaagaccgtgcttaaatgtattagcaccttcagccggctgtaatttttcatcatgcgtgttaataaattcagcttgtttatcttgatccataacgaaagagtggggtaactctttttctaatgctcttgcaaatgtagtttttccactgtgtgtttttccaactgtaatgatgactaatctttttatgacgccctccatttgtattgttatgaactggaatattcggtgtagatcgaaatcttcctgctagagattacacaaattgttgagcgttagtaggctgaaaacttgacaaaaaaacttatttatgctataatttaccaatataaaaataaagtgtataatagggttctcctggccaggggaaccctatttttgttgtaaaaatgaaggagagtgtatgtacgtgaaacaaggtgaagcaagtgtaacgtcgttagtatcagctttcagcagggcatatcatagtgaatttgataatccgaaggtctttgatgattatatcgctaaagaattcatatcgccaaaagaacgtaacaatattgaaacgaacatggttcaagggattcactttttcaatacagacattgcagagcggtttcaagacaatccaaaagaaatattaaaatggattacacaagttcagttatcaccaacacctttagcacgtgccgcatattgtgaaagagtattactacatgaaattacattaggagcgaaacaatacgtcatactcggtgcaggcttagatacgttcagttttagaaaccgagagttagagaataaaatagaaatatttgaagtggatcatccttctacgcaggcgtttaagaaggaaagaataaaagaagtagaacttgaagttccaaataaccttcattttgtttcgatggatttcacgaaaggatttttctatgagcagttacggaatgaaggatttgaaaataaaaagacgttctttagtctattaggtgtaacgtactatttaacgaaagaggaactttctagtttaatagaatgtttatttgaggtggttccggcaggaagttctatcgttttcgattatcccgatgaaaacttgtttacggaaaagggactgtccaatcgagttgaaaatatggtaaaaatggctgcggtaggcggagaaccgatgaaatcatgtttttcttatgccgaaatggaagcactgttagagaaggcgggcttactcatttatgaacatttatcgccagaagacataaataaattatattttgaaggacgaaacgattatttgaaagcttttgagacagtgcattatgtgcatgcggtgaaaaggtaggaaattagtaggcatggggaggaatctctgtgtctttttttataaaaaaggaaatgagctgtagtggtggaaaatataattataaatatatataaattaatgttttgtagaaactaaaggaaaggggaaatagaagatgttgaaattacaagggaaatacaatgaagcaaaagtgtttactacgaatgtagaaaaaactgcagcaggtcaaattattgatctttgtaaccaagaattcgtaaaggatagcaagattcgtattatgccagatacacatgcgggtgcaggttgcacgattgggacaacaatgacaattcaagataagattgttcctaatttagtcggggttaactaatcggctcagactttaaactactcactcaattgactgggaaccctaacgataaaaggcgagggcaatcagcagccagtggttatggtgacataatcgaatggttcagagacttgtaccatgttagcagactaaggtacagaattattcctcatctattttgaattgaagaggaataattaatacggtgagcctacagtagagactgcatatctcgatgactgtagagaaggtatagtccactctttcaggaaactgagaggtaagtacgatattggttgtggcatggaagttgttatgattaataagaaaaaagaggaaatcaacttcgatcacttagacgaaacgatacgtaaatttgtcccaagtggttttcgtattcgagataaggaacatagattttcaaaaatgattgattttgatagtgtaagagccccgtttacattgcaacgtgctcaaaaaagtattggtacacttggcgggggcaatcattttgtcgaactgaatgaggatgataaaggaaatgtatacattgtcattcatagtggttcgcgtaatttagggaaacaagtagcagagtattatcaaaactttgcttacgagcaacttataaacgttaaatctattaaagaagaactgattgagcgtttaacgaaagaaggtagacaacaagaaatacatgaagctttacgtgaaattaagaaaccggtgattcgcaaagaattagcttatttagaaggacaaggatttaaagattacatgaatgatatgaaaattgcacaaaaatatgcagagttaaatcgtaaggcaatgattgatgaaatcgtcactaaaatggattggaaagtaaccgatcaattcactacaattcataactacatcgatatggaaaatatgattctacgaaaaggtgctatttcagctcagaaaaatgaacgagtaatcattccaatcaatatgagagatggttcaatcattgcatttggtaaaggaaatccagattggaacttttctggccctcatggagcagggcgtattatgagtcgcaagaaggcgaaagaagtacttaacttagaggattttcaaaatacaatgacagaggtttggactacatctgttgcagaaagtactttagatgaagcaccaatggtatataagccaatggatgaaattattgagaatacaaaagaaacaattgatattaaacatattattaagccactttacaattttaaggctaattaaaagaggagtaacgtttattaaagaaagaaaacttgaaaagatagcatattttgtggcggttatataacagagattaaaaagacaacatattaaactaagagattcatcatattcatttacatttatgtaatgttaaagactaaaaagctagattggcgcgaattgctaattgtggagtgtgtagaaaagacaaaatctcttaaaaaacacttaattttttattccattaatctttacaatctccccctataatgtgaattggacaagcacctaagagaagcagaatatgtcagttggtacattctattattagggggagaatttgtatgaaaaagacagttgcttcgttagcagttatggcggcattattaccgacattttcagcacatgcggaagggaaagagcaagttcgaaaatcagctacaacttttaatgttattagtgacattcaaggtgatttaggagattttgatcacgtattaaaagatatgaataaagtaacgccactttctagagcgcttattatgaatggggatataacgccgactggacaacagtcacaatatgatgatgtaaagcgtgtgttaaataaaaataagcatccagaaaatgtatggtctactgttgggaatcatgagttttatgctggtaaatggacagcagatgggaaactctctcaaagtacatggccaaatggtgtaactgaggaaactttatttaaccgctatctgaaatttagtggacaagaaaaggtatatcataaaaaagaattagatggctatccacttttatttttaggaactgaaaaatatatgaaataccacgattcaaaaatgtgggatgaagtatatatgagtgatgagcaattaggttggttaaaacaaaatttagaagagtatagtcaaaaagataaaaataaaccaatctttattttctctcatcacgttttacctgatacagtatctggatcaagacaatcaccatatttacaagattatttaaacgtggataaattgtacgatatattaaaagactatccgcaggttgttttcttcacgagtcatacgcattgggatttaaacttacctgactgggctggtaaaaagaaaattaaaggcggagatgaaaaaggtttcactgttgtaaatacgggcgggattgaaacaggctggatgtcagcagggccaaatggaggagagaaaactgctccagatggctattcatttaaacaagggttacaagtgaaagcatatggtaacgatgtaattgtgacagcttacgattacaaacgtgataaggatataaagaagttattaattagtgattcaaaaattgcgcagatggcaccaaatgtaacggcagatgatagtgaaaatataattgtcggtgcaactgaatatatggagtattctatagaaggaacgaatgagtggcatacgtatagtaaagcaaaccctccgaaatttgatggggataaagtcgtatacgtacgccataaaggtgaaatgaatttagagccgggattaacacagttacttcgtttttcggtaaataagtgattggagggagtctgcatttgaatgtgtaggctctttttttgttgatgagaaaggaggtgcctgtctgtcgttttttgtcgatagatcgatatattaagaaaatcgttgatatattgcaagttacgatagatacatttgaaaaattgttgatatattgtaaggaatgaacgatatatttgaaaaatcgttgatgtaaatttcatgtaccgtaattaagttaaaatcattaatacggttttacttatcaaaacgaaattctaatacatttttaaccgagaaaggtgacttcaccatttttacgtgtaataatagtaacgttacatatattgtgaaagaagtacaaaaggagcgttacaatgaatttagctaaattcccgagaaaaaaatatacagaatcatatacaccaattgaaaagttaaacaacttttctgaagcacttggtggcccgactatttattttaaacgagatgatttacttggtttaacagctggtggcaataagacgagaaaattagaatttttagttgcagatgcacaggaaaatggtgcagatacgttaattacagctggtggtattcagtcaaatcattgccgcctgacacttgctgctgcggtaaaagaaaaaatgaaatgtatccttgtattagaggaagggcttgagccagaagagaagagagactttaacgggaactatttcttatatcacttattaggtgctgaaaatgtaattgttgtaccgaacggagcagatcttatggaagaaatgcataaagtagcaaaagaagtaagtgaaaaagggaatacaccatatgtaattccagttggtggatcaaaccctacgggtgctatgggatacgttgcttgtgcccaagaaattatggcgcaatcatttgagcaaggaattgatttcagttcagttgtttgtgtaagtggaagcggcggtatgcatgccggtttaattactggtttttctggaacgcaaagccagattcctgtaatcggaattaacgtaagtagaggaaaagctgagcaagaagagaaagtagcaaaacttgtagatgaaacttcagcacacgttggtattccaaactttatcccgcgcgacgctgttacgtgctttgatgaatatgtagggccaggatatgcgttaccaacgccggaaatggtagaggcagttcagttacttgcgaaaacagaaggtattttacttgatccagtgtatacaggtaaggcggtagcgggattaatcgatttaattagaaaaggtaaatttaataaggaagacaatattttattcgtacattcaggtggttcaccagctttatatgcgaatacttctttatttgcttaagtgtaaaaagcattgggtatccaatgcttttttgttatataatggaattgctgggaggcgggaggatgatatgaattcaaatttaaaatggattatatatacggtactcggcatttctattctattaatcttatttgtggcttatggggtgtattcttattttacattttaaaagcgtaatggaagtgaaccataatgtaatgtatgttatagtttgatatgttaattacttacaatactttctacaaggagaatacataatgagagcaaagaaactagtaacgttagcagttccatttatgctgttagtcggatgcgaggtaggagataaagattctactcataagactgagcaaactagtaaagcaataacgaaaacagtaatttctgaacaacagtatctgtactacatatgtgagcaagtggtagagttccaatttaagaaggatgaattgttactaaacttaggagaatccttaaaggacaaagaaaaagcaaaagctgttttaaaaacatcaaacgagatagataaaattttagacaatatggaacacataaaagtacctgatacatacaaagacattcacaaatccatacaagaaggggtaacagaggcaagaaaagcaacgaagttaattaaggatgctggtaaagaagataaacagaagattcaagaagctacaatgaaaggtactgaatttttatcaggtgtagacggagagcattggaaaaaagcaatttatgagttatcacaggaaaacaaagatgcttatagtaaggcacttgataagaaagtaaaggagcactcaaagtaaaacagtaacttgtaataatacatatccacctaaaatttccgcgaatgctatgctaggaagttaggtgggagattactgtccttaaatgtggttgattaaagctacagccacattctcctgttctaattaactaaaagaagaacttccccatcccgattagactactgatcattcctattccactcatggtaccttttcctgctgtaagtaagtttccaatcattcccagctgcccgtaacctccgttattcccccatcccatgggacttatctgtcctccccatcctggagagtttccgaaaatacccccgttattggtattgaatttaaaagccttagctggcggcgatagtaaagctgcgagatgaccttgtgcgaacatccctgtatgattgaatggttgcgcccaggggaagggaggtttttgaaaattaaaacctgcatgacctggtaatggagtccaattagcagggtgaccttgtggtagtatctctgcataattaattggctgctgcccccaagagaagggaggaggttggggattgaaccccgtataattggctgatgaatcccaactaactggatagactcggtaactccaattctcaggaagcttcaaatcattcattacctcagatgtagttatttcgggctgtgaatataatgaaatttggttagtatattgttgcccatttccctttgaattcaaataccaatattggtccatacgcttattctcctcactttaaaaatgtaatgttagacttagcctatgtaatattcctttttatggatggttacataactagatctacaagcctgtatttaaaggaatgggtgcgtagtctttttgatttttctcgctgcctgtaaaattcccattgatgtaaagtttcactttattttagaaggggattttcagttgcttcttttttgtatttcagcctaatttaaattccgttaacaaacatttttataaaggtttaatcaacaaaaagattttaaaatggtatgttgagcaagtggaattgctaaaaagagaatatccattcgaagagtttggcaaaatactgtaagggtaatgttttcttgtgcaaatatgtaaacgatttaaacgaatcaatgaaatttataatgaaggggcaattaaatatatgagtgaaacattacataaaagaaaaccaccatatgtaatgcttgtaatcctttttattggggcatttgtttcatttctaaataactcccttttaaatgtagccttgccatcaataatgaaagatttaaacattcaagattattcaacgatccagtggctttctacagggtatatgcttgtaagtggtatattaattccggcctcagcatttttaataacgcgtttctcgaataggagcctatttattacatctatggtgatttttattcttggtactgccttagcggctgtagcacctaactttggtttattacttactggtcggatggttcaagcggcaggctcttcagttatgggacctttgttaatgaatattatgctagtaagctttccaagagaaaaaaggggaacagcaatggggatttttggactagttatgattacagctccagcaattgggccgacactatcaggttatattgtagagtattatgactggcgtttgctttttgaaatgattttaccgttagcaatcattagcttactgttagggatttggaaatctgagaatgtcatgaaacaaaacaaaaatgcaaaacttgattatctctcattactattatcttctgtcggttttggcggtttgttatatggattcagttctgcaagctccgatggttggacaaataaagttgtcttaacaaccttaatcataggcgcaattgccctaattgctttcattattcgtcaattaaaaatggatgagccgttattggatttacgtgtttacaagtacccaatgtttgcacttgcgtctgtaattgcaattgtcaacgcggtggccatgttttcgggtatgattttaacaccagcttatgtacaaaacgtccgtggcatttctccgctgagctctggactgatgatgcttccaggtgcggttataatggggattatgtcaccaattacaggtaaactatttgataaatatggtcctcggattcttggcatagtggggctttccattacagctgtttcaacttatatgttggcaagtctgcaaattgactctagtcacacacatattattcttatctacacactgcggatgtttgggatggcgatggttatgatgccacttatgacaaatggtcttaatcaattgccaactcgcttaaacccgcacggtacagctgttaataatacggctcaacaagtgtccggttcgattggtactgctattcttgttacgattatgaactctgtaacaaaaacaaaagctgaaagtttaatgtctcatatagatccaacaacctttacagaaactacgaaggcaatagtaactcagaaggctttattatctggaattcaatattcgttttatgtagcgcttggcatgaatgttgttgcactactattagtttttttcgttaaacgtgtagatacaagtgcggaagctgtcgagaagctaaatcggtagagaaaaataaaacgcttgataatgattccaacaagttttttgctgctaaggcgccggtatttaaagctggaaaagaactaaaagaagcagggaaataattatatagtaaaagaggacctgatgttcatatcaggtcctctttcattagtaacacggtatacttgcttatcgtattggtttaactaaactactgatttttcgaatactacaatcttaagctcgtcaacttctctatttttggggtgttttagaagaaaaatgaatcaaaataatcgtttttataaacaaatacaagagatgagatccgtttgcaatttctcataaacattacaagtttagattatcttttaacaccaacattaaaaggctccaactatatttattcgcttcattttaatttagtatttttctacaagttataagtctaattgccaagcttatacgtaatatcataatcatgaatagttagggaaaagataaaataaggtaatcaattacatatctttatcccaggcgattagttgctatttcctctttattaaatgggatatgttatttcatgcttttttgaaagggtgttttaaatggaaaaaaaagtatctgccattcctcagccgaaaacatatggaccgctgggtaatctcccattaatcgataaagataaaccgaccctatcctttatcaagatagcggaagagtatggtcccatttttcaaattcaaactttaagtgataccattattgtcgtttccggacatgaactggtagcagaagtctgtgacgaaacacggttcgataaaagtatagagggtgctttagcaaaagttcgcgcctttgctggagacggattatttacaagcgagactcacgagcctaactggaaaaaagctcataatattttgatgcctacatttagccaacgggcaatgaaagattaccatgctatgatggttgatattgctgtacaactcgttcaaaaatgggcacggcttaatccgaatgaaaacgtggatgttccggaggatatgactcgtcttacgttagatacaattggtctatgtggttttaattaccgatttaatagcttttatcgtgagacccctcatccttttattactagcatgacccgtgctctagatgaggcgatgcaccaattacagcggttagatatagaagacaaacttatgtggagaacgaaacgtcaatttcagcatgatatccagtctatgttttctttagtagataatattattgctgaacgtaaaagtagtggagatcaggaagaaaatgatttactttcccgtatgttaaatgtacaagatccggaaactggtgaaaaattagatgatgaaaacattcgtttccaaattatcacttttttaatagctgggcatgagacaacaagtggattgttatcttttgcaatttactttttattaaagaatccggataaattgaaaaaagcctatgaagaagtagaccgtgttttgacagatcctactccaacataccaacaagttatgaaactgaagtatatacggatgattttaaatgaatcactgcgtctatggcctaccgctccagcattcagtctctatgcaaaagaagatacagtgattggcgggaaatacccaattaagaaaggagaagatcgtatttctgttcttattccacagctacatagggataaagatgcatggggagacaatgtggaagaattccaacctgaacgatttgaagagctggataaggttcctcatcatgcttataagccatttggaaatggccagagagcatgtatcggtatgcaatttgcacttcatgaagccactcttgtaatgggaatgcttcttcaacattttgaattaatcgattatcaaaactatcagctggatgtaaaacaaacattaacgctaaagcccggtgattttaagattaggattctaccccgaaaacaaactattagccatcctactgctcttgcacctacagaggacaagctgaaaaacgatgaaattaagcagcacgttcagaagacaccttctattattggggccgataatctttcacttcttgttctgtatggctcggatacaggggtagcagaaggtattgcaagagaattagcagatacagctagtttagaaggggttcgaacggaagtggtagctcttaacgatcgaattggaagtttgccaaaagaaggagcggtacttattgtgacttcttcttataatggaaaaccgccaagtaatgcagggcagtttgtgcaatggttggaggaactaaaaacagatgagctaaaaggggttcaatacgcagtttttggttgtggagatcataattgggctagtacctatcaacggattccaagatacattgatgagcagatggctcaaaaaggagcaacaagattttctaaacgcggagaagcagatgcaagtggtgattttgaggaacagctcgagcaatggaaacaaagcatgtggtctgatgcgatgaaggcatttggattggagctcaacaaaaatatggaaaaagagcgcagtactttgagtctgcaatttgtcagtcgtcttggaggatctcctcttgcacgaacatatgaagcagtttatgcgtctatactagaaaatcgtgaactccaatcatccagcagtgatagaagtacacgacatatcgaggtatccttgccggaaggcgctacatataaagaaggagaccaccttggagtgctgccagttaatagcgagaaaaatatcaaccgaattttaagacgctttggattaaatgggaaggatcaagttatactgagtgcaagtggacgaagtataaatcacatacctttagacagtcctgttagtttattggaccttcttagttatagtgttgaagttcaagaagcagccactcgagcacaaatacgagaaatggtaacattcacagcatgtcctcctcataaaaaagaattggaagcattattagaagaaggagtttaccatgaacaaatactaaagaaacggatttcaatgttggaccttcttgaaaagtatgaggcttgtgaaatccgatttgaacgctttttagaacttcttcctgcgctcaaaccgcgttactattctatttcaagctctccactcgttgtacagaatcgtctgagcattacggtcggtgttgttaatgcgcctgcatggagtggggaagggacatatgaaggagtcgcttctaattacttagctcagcgtcataataaagatgagattatctgtttcattcgaacgccacaatcaaactttgaattacctaaagatccagaaacaccaattattatggttgggccaggtactggaattgcaccattccgtggattcttgcaagcgcgtcgtgttcaaaagcaaaaaggtattaacttaggagaagcacatctatattttggttgtcgtcatcctgaaaaagattatctttatcgtacagaactagaaaatgatgaaagagatggattaatctctttacacacagctttttctcgtctagagggacatccaaaaacatatgtacagcatttaataaaacaagatagaatcaatttaatttcgttattagataatggagctcatctttatatatgtggtgatggaagtaaaatggctccggatgtagaagataccctttgtcaagcgtatcaagaaattcatgaagtcagtgaacaagaagcaagaaattggttggatcgtgtgcaagatgaagggcgatatggaaaagatgtttgggctggtatatgactgtttcttaattagatacatattaactaataaacttctttcgaataaatttcactttattagtatcgtgtatttagatgaatagtgattaaccggactatttagtatctactaaataaaaaacaggacctgatatgcatctatcaggtcctgtttcacatagacattatacatcgatattttccacgcattatcaatgtttgtaatgtagttagccttttgagtcagctataaaatcagatattattttttcaatatcgaaaggagtaatccctttatccaaagaaaaaatgctttctgcttcttcgatgtcttgaacgagttcacctctagcttcaatatgtaatcggaacaagtcatataaattcggtttaactaaattagttaaagccttcccaactagtatcatacctttttgattagcctcgatggtattatcataagttagatctctcgtaagagacaaatctgtccaaatcaattttcgttcctttaagtctaaaataactggaatagagatttgggtgtcggcagtaatatccactttatcttgaacagtagaaggttcaaatatttcacctgaaccaggatattgacgaaccatccaaccagtaaagcattctggtaaatctttatacggttggtctgtgtaagaaagcaaagtcattactacatagcgtgcaccatatttcagcacagacggaatatcgaaatcaatgaattcagatgccccctttggtgcagaagtaatatctccgctatggtaggctttgaaattttttgaacgtaagttcgtgaaggatacatgttctttgtattgccaatcttcgtcgtacattgcagcagataaatcaatgtcaacacgtcctgtatgttgtccattcacatagccttctttccaccataggaaaaaacgaatcgtatctccttctggcaaatctactttacttcctcgagataatgtgcgaagcgctttgctggctgaacgttgagagaagggaactaagtgattttttaactgttcatccaaaaatacttttccgagacttggaagttctgcgaagcgattttttaaagtatcttcacacatttttacaatcattaaacaaatatcctctgagataaatggaagtgtattttcgatacctatagcttttgctacatttccctttggaaaaaaggtacgaaattcatttttatcatttcgatgcttaaaatgagctgtgagttgaagtaatacaggagtagaaacgtttcctattatacttagaaaatcttcgagaatattgaaaacatctgttgacttatcactacataaacggattaaatgatccaagcgtctggcaaattcccccgggcgagtttttaaaagattttttgctgtcatgatatcacgattcaacaaagctgcttctatttttccattaaatgtttcaactttaatgttgttgcgaagaatctcaaatgctcggtgggtttttgggaaacgagtatgatattctgctggatgaagaatttcacctaaacgaatccaacgttttttgtatcgaagcatatcttcggtaatgtttccgcattgctctaacaatcctaaaaggaagcgtctttctgctcggttaaacttcttgaatcggacggaggatgctaaactcacatcgccttcagataaagcaactgcaaggcgaagaacatcagttgctgttttaaaatactttgcagcagcatcggctgatatttttctgtttattaataaaaccccaattataaaagacatattttccttatgaggaattacattaggtagaaaacaggaaacatcttcagtgtgtgtaatagcccattctacatccgtcttatcagttgaggaaatagagctgtttgcactaatcaattgagaaatcatttgattgaaatcttcttcacttcctaagtcaataactttcaaatcaactctatctaaaagagggagtcgttcttctacttttgatacaggtaggcgcaacgtcacataatgaataatggcattaatgtataaatcagcgtcacttaaatccatcatttgttgcggaaagtttggatacataggagtaaactgaatatgtgctccaaccatttcttttaaatgttttaccaattctttgtaaaacgatgtgaatgcatcaaccgaaagtgtttgcaactcttctattaaaggctcggaaaaagtaaatcctaaattttccaagttttttaaaacagtggctaaataaatgttcggtagtttattttcttctctttttataattactttcaaacttcttcttatgtaaatagaatttttcatgagaacgccagctattcacgccttataaaagaggggaatagtctgactgtcctcctttcagtggtagatttttatttttatatgtataaacacactaattgtagaaaaatgcacagagggtacatagctattttttagtggaaaattagggatataacatttagttgttaagtggtaatttgttaattaagaaaagaaaacctctacatcaatggttgataaactaaagtttatgcaatcccaaagaagaaagaggttttatagtctaattatttttcatagggaattgacaactctaaaacaatttgaaatttctacaaagaaggaagaattgtcatagcctatgtgtttagcaggaaagtaacatccctatttggccaaagaagttagaaggaaggaacgtcatagcctgctttattagtatattctcttgcgaagagcaattcaagtatactgtctgattttttatttttttcttaaaggggaattttcatgattatcccgcattaacgggcagccagattggtgagggtgattaaagtttcactttataaatagggagaccatcacatgccctttttataatgctattacgggaggatttttatttttgatatattataccatttatttaatggtataatatggtatgcgttctgtggaatggagttgaatgagtattataaatacaaaaggtgaaattaaaaaaacgaaaagaaaagtattactaactatacttactatgttagtaattataattggatttggatattggaaactttttagtttgcaaggtgttccaaaaggggaattaattcgaacagtgaaatctccagatggaaaatatctcatcaagacttattttcataatgcaggatcattaagtgcggatgctgttaggggtgaattagttaaccttgatacagattcagagaaaaatatatattggaactatccagatacagatccatatattgaatgggtaaataagaatattgttagaattggagatcaaactttagatgtttcacagaaagaaacctatgattggcgtgatgacgataagcacgttaaagaaatgcctaaacagtttattagataaaataagaaaaattaaatttatttaatcttattcgtttaactatagataggattatatgagtgaaaaagtccatttagattttctaaatggacttttttagatttctagatacgactactgataaaaatggaacaaacttgttatttaggttgtctattaagtatacgtataaaacaggggttcatgatagttcactcattttatgaaaagtgagatgcaagagagtgatatccgatacactctttaattgtatcgatatgtataacatctaaaaaacatatattcttgaaagaggttgaaaatgtatgatagtcttaaacaagttttttaacattttacattacaaaaagatggtacctgtagtatttctttcatgtgcaacgcttataggctgttctgatggtaatactcaatctgaattacctaaacaaacgaaacaaacaaatcaaatcaaacaagaaattactggtaatgattcttttgttaaacttgaaaaagaatttgatgctaaactcggtatttatgcattggacactgatacgaatcaaaccgttacttatcaatcagatgaacggtttgcatacgcatctacccacaaagctttagctgtgggagtacttttacaaaagaaatcaatagaagatctaaatcaaagagttttgtatacccgtgaagatcttgttaattacaatccaattacagaaaagtatgttgatagtggtatgaccctgaaagagcttgcagatgcttctcttcgatatagtgataatactgcacaaaatcttattcttaaacaattaggtggacctagtgaattcaaaaaatcactaagagaagtaggagacaccgttacaaatcctgaacgttttgaaccagaattaaacgaagtgcctccaggagacgtacgtgatactagtaccccaaaggcattagctactagtcttcaggcttttacgctaggagatgtactttcaactgagaaacgggatttattaatagattggatgaaaaggaatactaccggagacaacttaattcgtgccggagttccaggaggatgggaagtagctgataagactggctcgggatcttatggaaccagaaatgatatcgcaattatttggccaccaaataaaaaaccaattgttcttgcgatactttctaatcatgataaagaggatgctaaacacgatgataagcttattgcagaagcaaccaagatagtgttagatgctttaaaagtgacaaataaataataatagtaactagttattattattttcccggtttttcgtcacaatattgtgagtcatgattttgctagcggactaatgtttatggggttcttcgttggagttgcatttttagcaacgatggcaagttgcttaatgtttaaagttctgtcgggagcatcaaaagatgtggcacgttatcaaacgtttcgtaaaattgttgtccgccgagaattattaacaaactcaatctataaagagttatacttcatatttttattcccagcaattgtcgggattactcatatattatttggtatgaacatgtttagtcctattttaatcaatccgtactctcgtatttggttaccacttgttatttttgtagtaatttattcgatttattacttgattacagttcaattatataaaggaattgtactctcgaaaaaaagatcaatgtaatgatgttattcataaagaatgatagataatcctttttggaaagaacaattaagagagagataacattaattatcgactgtatcgaaagtgaaatcacttctttacagaaggagatggagaattaagtcaatcgaatgaatattatagcctgctaatatcccagagtatgttataaataatattgccacttgggtgcaaggaagattgaaatgaaattagcaaccatatttttaaatagttattttcagaggcaacaagtgtattagggagggggcatttggcttagaggaatcttcatgtgaaaagacctgaaacagccttccctatagcaataataaagatgtctaatttctaatatagaaaataatagcgttgctacattcaatatgtagcaacgctatttaaattttttaaacagggttaaatttttcaagaaatttacctataaaaaatgatatccaattaaattcataagtttatcctctatgtattttgtaactacatttcatcttgctgtaaagaaacaaaaaacacttttttattcaataattccaatttctagagccttttgaacagcttcttctttgttactgactcctagctttgtataagctgtggaagcataatttctgaccgtaccattcgataaatataaccttgatgctatggtagtgtaacgaagtccttttgctactagctgtaatatttctatttccctagctgttagctcataagcggttgcttttgattgtggtgtctcttttttctcatcaaacttctcaaatattttgtgagacattccctgatcaattagtgtcccacctttgtgaataagtcggatcgtattggctagctccaacgtttcaatagatttaagtaaaaaaccatccgcaccgttgcgaagtgattccactgcctgttcggtatcttgaaacgttgtaaaaatcaatacgcggatatgtggccattgttgcttaatctttttggttgcttcgattccatccatgtgctgcatatctaaatccataagtataacatggggttgaaggcgcccacacaaatcgatggcttgattgccatcctcagccaagccgactacatttaaatcttcatatctatcgagtagtgtcctcaaactttctcgaacaaatggctgatcgtctacaattaacaaacgaataagtccattttttatttcagtttgtcgcggtatggtgcatgtaacaagcattccttcttctggctttgtatatacagacaaatgaccttgcaagttcattgcccgttctttcatcgcattcataccgaagccttcctgccattctacatttccttttccattatcttgaacttctaacctcgtatattgttgttcaaactgcaatgaaactataatttcagtcccttgaccatgacgtactgcattcgtaagggactcctgtaagcaacgaatgaatgtgatcttcgcttgccgagatagttgatattcctctccgaatgtcctaaaacttacatttacctgagcgtgctcctgaaattcggctccaagattttgtagagattgaattaaggaaggcgattgacatggagaatccatttgatgtaggtaacctctcacgtcctcgatgcttttacgtcccatttcaagcagagaatctagcctctgtatacccatttcagtagcaagttcggtacgcaacgtttccatccccataataatagaagtataagcgtgaccaactgtatcatgaagctcattcgacagtctgttccgttcttctgccaatgtaatgcgttcaatttgagacatatattgctcaagtaccgcgttttgtttacgaatcgcttcattttgcttatgattgacgattagtaaatggaaagcgaatcccattacataagcaagtccatagtaggtaaccataatccaatagctattacttggtgcaaccgcatagagaattccagttgttataaaaactgttgttggagctgtccaataataggacaaatgcttactattcgcagcaattagaaacaccgatataagaaatgtcttgttagcttccggaaataaggaggttaaatatatacacagtccaccatatagcagtatttctgtggacaagtaatatttgtaattgaacagtaaggctacccatggaatagagaaggcaacaacctcccaaaaaataataatccaaagtggtagtgtcaaactattctgaaaatctaacgtgattacgacgatagagacactaacaagtatacggactcctaacataatccaatcgtaccaaaaccaatacttaaccatatctaacaagttattcccccccctaagtagcctaccattttacttcctatattataaattaatccttcatacattgttatactttttaattttacactacaattttctcgcaaaagggaaacttctatcgatttagttgccgaatcatgctacgggtatagccaccaattttctttgtcaaacgttctactattctaatacttatggcggtaaatactatacccataaacattacaaagagtgacttggcaaaagtatctatctgtatgaatataatattcatttcaatgtagcgatacagtagtggtgccaacaggaacataagtggcattacataaaaaatgattgtactaatgagactgaaaatgccaatcactaatttctgcattaaccaaaagacagcagaccaagtgcgacgatcagtaagcactaatttcacctgagtccagttcgatgtatctattgttatacttctgtcataagagtctgttgaaatatctgtataaattttcgtctgtatgcgttcgaattgaataaaaggtgtagtagtctgtagtacacgtataattagtggaatcccaattaccgtaaatgaaagggtgaagctgaatagcagagctattagataaaaacaaaaataaaacaaccctgtaacgaaagttagcaataaaaaataaccattctgtatgaatcttgatttcataaagttcatcgctcctatctatataataaccgaatcatactgctttttttgtcattctcactagtgtaaaagtgtcatatgacatttctaaatgatgttaaaaaggggagaacaacctacttctggttaaaaaagatgcgtatattaatctccataaaacaatcccgtttttgcatctgcaagaacgggattgttttgtatttttatttaatatgagagtgacttgtttttcgaatatgaaaaataatatcaaattgctcaagcaatgatttatcaaagtatacagatttgttcggtaagagtcgtgcccctatactgagtaatggtctttttgctttaacccatttctttgctggtcctttaaggtgacgattatctaataaaaacatttcatatggtacttttccgagggtataattgaaactatttacatcttgtggaatcagatccgttataatcttatcttgggtgtcgttgtataaggtgacattcccctccgtagttgtactgccaattgtgacataattattgtctaaacgttccttcaaaaactgccccgaggcataagggtatgattcctcatcgataattcctttagccatatgaatattgtgtgtccacactatcgttttaccacccaatctctcttgtgcccacattgcatgatcggccatgtattgctcatgtagctttaacagacttggaaagtcgttaggaagtagcattgtggtaaatttctctattgcacttgccgttgctttcgcccagatgtactcgggtgaagctatttctgtgttggcttgcccattctcatcttttagtaattgggctactctctcagcgtttgccttgaacttttctcttatttcaggagcaagtttcatatattcctgtaaactgccagtaaaagacggcaattctttataattttcttctacttctgccagcaaatctggtcgatgcacccttacataatcaattactttattaaagcaaccttggtccaactcctttaagtcgagcccaataaattggatcttttttttattggatggatcagcattataatctttcatccactcaaccatggctataatttcatcagtaggatataacaagtttaaaaattctctagggtttccttttcctgtttggatatattcatttagttttaagccgtttccccaatcttcttccattgtgaagtttgtaaaacccatctcagtaaccaaatatttcacaaggcgaaacttcatagtgaaaatttcagagcttccatgagtattctctcctaatcctacatattgtgcgctcccaatcattttcttaagtggttttaaatcctcaaatgattttgacggctctatcgtttttaatggataagcctgtgattgtattgatttaactatatttttttgtattgattgatttgaattttcgactgctactgtttgagcctttcctacttctacacatcctgtgactaataaagctgtactaaccattgcaattattcttttcttattcattttttccacctcaattgaattatttgtaaaagcaagattgattcattgtacttgcacgaatcaattgccttaattcaattgttatctatcccatatcatattttctagttacatattgtcataaagttaattgacacagatcatatgctaatcattacacttttgtactatcggctatgacaacttataaataataattacattgatgagtcgtaagtaagactagattataaatgggggagggattttaaagatgaatgaatttgtatacaaaaatatttttattctaagttgtgtctgtggaaatgacaagaagtatattcgataaacaagtgaattataggggaagggcggattacaatgatattaaacgcaaaatcgttccacaataaagataaaatccaacgtgctaaaataggacttcaactttttctgagtatcttaatcattacttcaattatcctaaatgtagtagtaataattacgaaaagtatgccacttattgtggtatatatgtttaccccagcattatcttctattttgactcgcataatactgaaagaagggtttaaagatgtatcttttagtctcggtaacttaaagatatggaaggggatcggttttgctctgctaatccctatgattatttgtggaattacttattctatcgcctggttgagcggaattgcggggtttcagtatcccgaagttggtatgtttattttagaaccgatctacaatatgcttgggcttcagtatgtaacggcaccattcagcttcatttatctagtagtattgagcggcattttcggaagtttgcttggcttaatcccagctttgggagaagaaatgggttggcgaggttatatgctcacaaggctagtcgatgcagagttttcacggcccatccttattagtggattgatttgggcaacgtggcatgttccaatagttattgctggtctatatgtagcgggaccatctgtcgttctttcagtacttggtatctatctttgtattgtaccattcggttatattatagcttatttacgacttatcacaggcagcatttggccttcggttatcatccatgctacttggaatgccattattcaaggacctttcacacgtgcaagtacagggtatcaaactgagatttggattggagaatctggcttgataaccgctagtattatcttgattactgcaataattacgtctcgaatcgtgaattttactaaatagcatacggatgtgttttaaattcaattagtgaaatatgacgaggcgaaataagatgctcctaaaaatattagaaaaaatctagttgaacagactcttacttcatcttaggctgctggatatgtgggggacatcaagctaagaaaataaacttggttgccataaaaaacataatgttttcatttaaaggctatgagatgaaatttcatcatcttcatcaagtttgaccttcaggaaataaaaagttaaacgattatacaaatactctaactgaaaaaacgatagtccttctacattttagatagaaggactatcgtttatttttttgacaaaattaggaggtgatgttcataaaatggataatataattcgtatttgcgtaaagagaaaaagttttccaaagaagatgtagttaatttccttggtataacggttgattgaaatttcattttataacttgtaaagggctgtgcaatgcatcgtactattgaaaaatctaaatttaatcattaaattgcgataaaatgtggtcggaaataatgaaattttaggaaaaataaggtacactagtttatgattttagttgaaaatcgtttgacgttaatgcatacgggggaaagattgatgaacaacaatacaacaaatgaatcagttgaagaaattgatcaaaaacgagtaagatcaaaaaaacgttatacaaattggaagtttattgcagcgggtattggtgtaattgcacttcttattgggggaatgagttattatcaggcaactcacttcaattcgaatgttacaattaatgacacaaaagttggtggtctgagcgctgatcaggcaatacagaaattaaagacatctggactagcaaacaaagtctatgttgatcaacaacaaattttagatgaaaaagatacaaaaacggaacttacggaaaaagatttgcctcaagttaagaaactattaaaaaaccagtggacatttttcccttcctcaaaggtagaaaattattcattgctaccagagaaggcagatcagtatcgtagtgaaacgttgaaaaaacttgtagaagaaaagctcatctctatgaatgagaaattaaaagcgcctcaagatgctatggcgaagctagaacaagggaaaattgttatttcgaaaagtgttgaaggaaaacagtatgatgttactagtctactgaaagattatgataagcaaaaatataaaagcgaaattcatctgaagtctgcatacataaaacctattaaagaagacgatccgattgtcaaaaaagaggagaaagcactacagaatcttcttgggcagtctgttgagtataaagtgcaggatgaagtttatcctttaaaagcgaaagatttaattcaaaatgcctctatgtcaaaggatatgaaagttacaattgatgcgagtgacattaagaagaaaattactgaaattaataatgccaaatcaacattaaataaagatttctcatttaaaactcattccggttcagtcatatcagtaaaaggagaaggatacggctgggcactagatgttgaaaaagaaactaaacaagttcaacaagcctttgagaaaggcgaaaaatcgctttctgcttctaatattcacgggaatggttgggagaaggaaggcatcggttataaaacaacatcgaataatggcatcggagacacgtatgcagaagtttcaattgcagagcaacaaatttggatttacaaagatggaaaattagttgttacaacaaatgtagtaactggtaaacatagtactggtgaagatacatcaccaggtgtgtggtacgtcctatataaacgaacaccatatacgctaagaggtaacgcagtaggaaaagctgattatgcggttaaagtagattactgggtcccattcacaaatagtggtcaaggattccacgatgccggctggcgcaaagactggggaaataatgcttatttaacaggaggatcaggtgggtgtgtgaaccttcttcctaatgttgcaaaaactgtatatgatagtttgaacacgtatgatccagttattgtgtattaaaaaatagctacgtatcaagaaataaacaaagcaggaaatcttacctgatggtatatgaaaaaacacctcttgcattcgcatactaagtgtgcaaatgcaatggaggtgtttttgtttgaatacaagagcgtattgcttataagaaacaaagtagaaagaaataataagtattcaaatagtcaataaaattgacaatgaatatcattttcacttaatatagaatcattgcatttaattagacatgaattttttgttaatataatagatttctattaagttgtcacatttaagaactatcattaaatattttaagaatttaaacgtaggaaagggtaatataaaatgaactggaaaaaaggcggattatgggttattatttttttcgttgtaaaaggcacgatttctacacttttaatcgttacaggtgctaaatattttgatttatcatttatgcaacttatcttattaattctgaccttattagtgatttctctaataagccgaaaattgctgtatagacataaacaaaacaaaaagcaaaaagagctaaatatataatggagccccagagacctttggatttctggggttttattttgatagttttttcgcatgtatatcaatttaacagaataggttgtccaaaatgataaaatcgatgatgtttaaaatgcgtcagttatttttaataacgattgatacccgtatttctacaatctgtataaatgactcaagcttcgcatcttatgaattccctgaagtgctaaacctaagcaaagtaatgaactatcttaaggaagaaagttgagttagctaatcgcatatattttattgaaaggatgtgattgaattatggaacggccgaattggggaattggaggattagtattcgttggctgtatgtttcttggtggaggagtgggatctatgttaggtaatgcccaaactggatggctaataggaatgggcgctggatttcttggtatggctttaacgagactgttcagaaaataatgtaactgagattcttcttctggtaaataaggaaatatgtaagtaagtcatggcataagagttctataaattatagttagaatcttctcttttgtatttgtcttttctaaatttctccatacatagatataattctcaagtcggaggatggcaccttagggtgtcttttttatgctctttaaaaatgtcttaccattataatagctgagttttgctttcagtctccgatgtccattaagcataaaataaaaattctgcaccatttaaactctgataacaattcatacgatcaagaataattgagttaatagctttcggtagatcgccatcatttttttataatagattagattcattgccgtttcagacctatgtatgaattcataatctaatagtaaaaggaggaatgattaaaggtatggcggttaatgaggaatcaatttgtcaacagtttgcaagaatcattggcggtcaagaaggattcgctggtgggaaatgcgtggcaacaataaaccgagatgaaatacgagcaacaatcttgggaaaacgttttagagtaacaacttccttttcattcgaatcacgagacaataaaactggacgggcattatgcctaggccgagtagcactcttacaaaaagaagtcactgaatttgtggcgacaattattaaacaaggaataatcgtttcgtctatacacaatgagtggttatgtgatgatccaaatttaatttacgttaatatcgaagacgttgatgacccactaaattttgcaagaaaagtgagaagagcgttatgcacgtaatcaatttctttagttaaacgagtgattatattaaattgaaaagttcagcgtgttggatggttttataaaacgaaagaaggcgtttcatatttggaatgccttttctttatgtgttcgttactaatgtgggtggttaactgattatatgctgtttatcttgcaacagcaagaactggacgaggtatctttaaagatgtttgactgtctatagataccatattttatcaaatgttattagcatatcataaaacgataagggagaaatcgccttcataccaaccaatcaaaatcttgaggtactattctttatgttgtaaggttccactattattttcatcaattactcaacgtattgcttcgatgttttctggagtcattttaataaatccttgcttttcatgagataatactttttgatgagtcattttgtgcatggcattgattatatgacgattagaattgaggtcaagtattacctcttcacctttaattctatcagtctgcttttccttaactcctgattatattagcttcaataacatatgatcattcttaagaatgtcattgaaatgtacgaatagatgttagtgcagcaaaataaattgtgttatgatatgaggaaatataaagctatgtaacggagggaataacatgccgcatgttgtgtttcgtggaattactactgaacaattaaaaagcataagcaagccattagtagaagaactcgcagatatctgtgagtgtggtacggataatttcaccttggaattaccaagttctacgtttgtattcaatggagaagaaatagaagcgtttcctcttattgaagtgaaatggttcgagcgtggacaggaaattcgtgatcgatttgccaaggccattactacatatgtaatggattttggacttccagaagtagaggttgtatttacagttttcacagaatcagcgtattatattaacgggaagcattgtgcaagttagagctattagaaagatttttattcctataataaaatatgtttcgttaaaaacaagggccggaattccggctccttttctatcccgcaaaataaagtcttactttatctctccgtctcaaaaaactcaatccactctccatcagggccagcgaagaatatgtaacgtgttccatctggtaatgtttcaatttcttctcctagtaaaaaggttactttttgtttctttagtctttcgatctcatcctctaatgaatccactttaaagcaaatgtgatgtacttttccttctgccggaagagaagagttgtagccttcaatgagttctagtatcgtttcttttgattcttctacacctaaaaaagcgagttttaagtctggattcggatgacccatacgtttcatgagctgtaagccgactacttcttcataaaatgaaatagatgtttctaagtttgcaaccataagtccaacgtgttcaattcttctaactggcatgtagattccttctttctgaaaattatatacaatatattattgaaaattaagaaaataagcaagataaaaaccttacaaattttagcgtgttatatggtatagtgagaaagtatgtttggggagaaggaaggagattatacgatgaatacaactactcaaactccttcattatcggaaacgatgaaagagtggcattatgcattagcgtatgaaattaaacattggaaaacgataggtggtagtaaaattgctatcatgaacggtcgttttttatatacagattatgaaagtacagtatacgtatttcagcttatttcggaagtaagcttacctgaaggttcacccattcgaattgagttcgatggtgaggaagcgacaggggaagtattatctatacatggattagaaatagagctgaaattaaatgattatatacaaggtgaaataagagaagcggttttatatagtgaaccgtggcaattgttagagcaactacaagagcgattgaaagaagcacgtaaagataagctgaaacgtaatcgtataaagcgtcttgttgatgggacgagcagtccgaaacatattgagaagatgaaaaatccaaaaaatgaactggcatatcgttcgttttataatccgacaacgtacgtatggggaccgccgggaacagggaagtcttacaatttatcacgtattatttcggctcattatcaaaaaggaaaatcggtacttgtgttggctcatagtaatgcggcagtagacgtattaatgagtgaagtaacgaagcaaattgagaagaaaaagaaatggacgcctggtgaaattgttcgttacggttatagtcaacatgaacatatacgaaatcatgaaacgttacttgcgtcgaagttagttgaaacgacgaacggatcttggggggaggaaagactctatttagaagagacacgacaagatcttcgtgaaaaaatcttatcgtataaagcaacatctgctgataagaagcgtatacaagagattgaaagtgatcttcgaaagcaaaaggctaaaattaaagaagtagaaaaagaatatattgaaaatgcaaaagtaatcggcgcaactttatcaaaatgtgccattgattcacttatttatgagcgtacatttgatttagttgttgtagatgaagtaagtatggcatatgttccgcaaattgcattagctgcttcacttggaaaacgtatcgtcgtttgcggtgactttttacagttacctccaattgcgatggcaaatcatgaactcgttcgtaaatggcttggggaagatatgttttaccatgctgggattgttgagtctgttaataaatcagaagcacacccaaacctatttatgttgcaggaacaaagacgtatgcatgcggatatatcgaagtttacgaattcgtttatttataaaaatagagtacacgatcatccgtctgtttcagagcgtaaagaacttgcgcaattgcagccgttcgcaaatgaagcgagtgttttatttgatacgagccaaatgggagctttttcgttaaaagatgctgcttctggttcacgttttaacattatgtctggtttagtagcaatgcaaatgatgttaatcggattgttagatggtgtgcaatcaattggtattgtgacaccttacagggcgcagtcacgctttttatcaacgtgtattagagaaatgttgcagagaacgaaatatcaaaacataccagttttagcggcgacagttcataagttccaaggttctgaaagagatatgatgatctttgatacggttgacagttatccgcaagaacgacctggcatattattctttgatcacaaaaaccatcgcctcgtcaatgtagcagtgacaagggcgagagggaagttcattcaattatctgattgccattatatgtgtaaaaacctttcgagaaaacaagcgttatcacaattaacagctcatatagaacgtcacggagatgtgtatgatcgtacgacatcaagacaattgtgggaacggaaaatttcgaaacgtttacgctggtttatggaaatgaatcttgaggaaacgaaaggggtattaaaagatattttagcctcaaaacgaaaaattattatttcacttccaagtacaaaacaagtggataagcgagtatggcaagcgttaatgcgtacaaatgcgcaaataacagtttatagtgatggaccagttccactgaaaaatgtaaagttacaaagacaaaataaagcattcccgtttatcgtaattgatgatgaaatcttctgggcaggcgcaccgcttacatctcaaatgatgtttgaaggtagtacggaatttccgtacgtatgtgcaagactgcaagcacctgagacaattggtgtattaaaaggatttttagatattcggtaaattcggataggaattccttgacttttacttggaatgaacttagaataaaaaataatttaatataattttatgaaaattcttatcacgagaggtggagggactggccctatgatacctcggcagcggattcgttaggaatactgtgccaattccagcaaggtaacttgaaagataagaaagaagctcattttgactgtatatacagaagcctctttctatcttttagaaagaggcttttttatgtgaaaataaaaggaggaagaacaatgggagcgacaggagtagcgtcacaaagaaaaacaattgaagagagtatcgaaagaaataaggaaaagtacatagaaacaagtcatgatattcatgcgaatccggaaattggtaaccaagagttttatgcatctagaacgttaagtttattgctaggcagtgcaggatttcagttgcagcacaatatagctggacatgaaacgggatttatcgcgcgaaaaagctctggaaaacaaggacctgcaatcgcatttctagcggagtacgacgctttaccaggactaggtcatgcgtgtggtcacaatttaattggcacaattagcgttgcagcagcaatcgcattatcagaaacgcttgaagaaattggcggggaagttgtcgtgtttggtacgccagcagaagaaggcgggccaaatggtagcgcgaaatcaagttatgtaaaggcaggtttatttaaagacattgatgcggcgcttatgattcatccgagcggaaagacagcgacaacgagtccttcactagcagtcgatccacttgattttcatttttacggaaaaacagctcacgctgcagcttcgccagaagaagggattaacgcattagatgcggttattcagctctataacggtattaacgcacttcgccaacaacttccgtcagatgtgaaaattcatggcattattactgagggcggaaaagcacctaatattattcctgactatgccgcaacaagattcttcatccgtgcagcaacgcgaaaaagatgtgcagaagtaacagaaaaagtaaaaaatatcgcacagggagcagcattagcaacaggtgcaaaagtaaaaatccatcaatttcaaaatgaaatcgatgaattactcgtaacaaaaacatataacgatatcgtagcggaagaactagaactattaggtgaagatgtaaatcgtaaagaaagagtagggattggttcaaccgacgcaggaaacgtaagtcaagtcgtaccgacaattcatccgtacattaaaatcggaccagatgatttaattgcacatacgaatgaatttagagaagcagcacgttcagaacttggagataaagcattaattacatcggcaaaagcattagcaaatacggcgtatcgattaattacggaagaagggttgttagagaaggtgaaggaggagtttagagaggcgcagaggaatcaggggtaaggggattaaggtgcttttttcgaatagagatctaattcataagtagagatataaaaaagaacattgaaatatcaatgttctttttttgtttactaatcattgatttcattggcttttctcataaaggaaaaacttttactgttagccggggataatacgtatccctttattagaacgacaatttctcctcaaactcactctttaaaacaattaaaggagacgataatccaaattgcattaaagagtctaaaaatgtagcgagagaatccatcgaatcgctcatgaccttcatcatataattaaattccccgctaattcggtataaatctgttacttcaggagcggcattacaaaattgaataaaatcagagcattggctcgttttaaacatgatgaatgcttgaatgtttttattaatttttgcaggctcaaatttcgttcgataagccgctataactccttgatcttcaagcttgttaatacgttcttttacagcaggttgcgtcatggatataattcgtcctatttctgaaacagaaattctcgcattttcatataacaggttcataattttatgatcgatttcatccaattttacagcgttttgcattgtgtagcctccttgttatgttttctaaagtgaattgtaaattataactataatatcataagtgaacgaactaaattacctataaatctatatttaaaatgattagtatttgcatgaaaatataagtatagggtttatcaaaagggaatttaggaaggatggaaaaaatgaagaatcttgatgggaaagtagcattagtaacaggggcaagtcgcggcattggtcgtgcgattgcgatgagattggcaaacgacggtgcattagttgcgattcactacggccgaaataaaatagttgcagatgaaacaattagtgagattgaatctaatggaggaaaggcattcttaattgaagctgatctcaatttaatggatggtgtcaaaaaaatagtagaacaattgaagaatgaattacaaataagagttggtacatcagagattgatattttagtaaacaatgcagggataggtacacaagggacgattgaaaatacgacagaagaagtttttgatgaaattatggccgtaaatattaaggcgccattctttttaattcagcaaacattaccgttactacgagtagaagggcgcgttattaacatttcatcagcggaagtaagacttggttttacagggtccattgcatacggtttaagtaaaggtgcactaaatacgatgacacttcctctagctaaacatcttggagaacgaggtataacagtgaatacaattatgcctggatatacgaagacagatatcaatgcgaaattgctagatgattcagaaatacggaattttgctacggattcatctgtgttcggacgaatagggcaagttgaagatattgcagatgtagtagcattccttgcttcttctgatagccgctgggtaacagggcagattatagatgtctctggagggttttgtttataggggcactactccataaccagcaagctaattaagtaaattactagttatgaaacgatcctcgtttcataactagtaatctatagaaaggtagagatgataaagaaatctattaaaacgtgattttttcgctaggcaatttgaataagggggctatttttaattattcataatctaaaataatccaattttattttacagtaacattaaaacaaaattattgaccgcatggtacaaaaagggtattctattcatattatctttaaaatgagaggaggatacgattgaataaacgcggcagacctcgagagtttgattattcctcaattgtagatgttgcaatgaaaacattttggttaagaggatatgaaggatgttctacacaagatttatgcagtgatacaggacttggaaaaggaagtttatacaatactttcggtagtaaacatgaactgtataaacaagtattagaacgctaccatgaaattgggattagggaacaaaagaaattgttacatactccaattccagttaaagaacgattaagtaatttttttgaatgggcattgaaagaagactttgagaatatggatcaaaaaggatgtttattgattaatgccagtatagaacgtgctaaaaacgatttaatggtacaagaaattttctcgaagcatgttgaacttcttaaacaagctattgaaacagtgatggaggaaggattgcaaacaggtgaaatttcaaagaagcaatcagctgaagaattagctagtctgcttttaagcagttattacggattccgtgttcttaatgtatcgatgcaaaatcggatgttgtctgaacaagttatcaaaggaacagtagagtctatttgtggcgcttagtgcgcccttttttcgcactatttttgtaccgatcattacagtaatggataaggagtgtttttatgccatcgattatttatttattagctttagcaatcttttgtatgactacatcagaatttatggttgcaggtatgatgaatgaacttgctcttgcattccaggtttctgtatcatccattgggtatttaatttcagcttatgcaggagcaatggtaataggaggccccattttaactgcaatcctcttacgaatgcgcagcaaacaagcattattgtttttaatgttcatatttttaattggtcaatcgctcggagctattgcttggaactatgatattatgatgatttcacgtattataactggtattgcttcagcttcagcttttggagttgcgatttccttttctgcgacattggttcactctgattcaaggggaaaagctgcatcaattgtacttgcaggtttaatgttcgcaactgtattaggtttacctataacaaccgttatttcgcaatattttggctggcgtattagttttggggctgtttctgttcttgtgctagtatcagcaattatgattcaacggttgttaccatcctcttcaaataaagagcaattaaattggaaagatgaacttctgcgatttaagaatattcatctttgggcagcgtacgtaacaagtatgttcattattggtggtacgtttgccgcatttagttatttcactcctatctttacaaatgttacagggttttcaagagcaagtattccatatttacttgctctctatggtagcgcgacagtaattgggaatataataattggcaagttcgctgataaatttacaatgaaaatacttatgggtggattaattatattaatcatagcgttgtctttatttgctttaagtgcagagaataaatacattgcagttatttctacgatttttattggtttaactggtgtagcattgaatccagctatggttgcgagggtgatgaagacagctagtaatggaataatgataaataccgttcatagttcttttattacgctaggtattgttattggttcgtcactaggtggtcttgggatcagtaaaggatatggttttgtatctccgctatggattggagcttgtttagctatccttggggtaatttcgttattcccatatttacataaaggaaaggcagattaagatgtttaaaatttctttatatgaggtactgccacattaccatcaagctaatactttcatatccccctaaattaaatttttctttctctacagatagctattctgagaagccgctcattttttcgttttgggggcatttctttttcttaagttgatgggcatagggtaccgccccacaaccatcaacttaaggattaaaactatttttgtaattaaaagcatgttactattctcattaacataagagaatagtaacgtgctttttatgaatatgcaccaaaaacaagagttatatcaatttttctcattttggggtatttgtttttcttagattgatggtgatggggcactactctataatgatcaaattaaaatttaaaatagttatagagactccatttctcggaaatattgtaactattaagttgtaaaaaaagccgtagtttttcatttttgaaaaggctggggtcctttttagttgtagcaaagatataatgggaggaagtttttctaaatcacaaaaaattgattaataagttgtataataaactcaatagcgtatatactataagcatcaaaaaaagttgatgaagggaagtgaactacagtgacacaagattttaagttatatgagaaaaagtttaaagcgttggctgatcagaagcgtttagagattatgtatgaactttgccagcgaggccagacttgcgtatgtgatttaacagagatttttgaaatgacgcaatctaagttgtcatatcatttaaagattttattagatgcaggtttaattgtaaaagaaacaaaaggcacgtggagttattatgatctaaatgatgcggaagtaaataatttattatcagaagaattatgttgtatctttagaaaaacaggaaagggtagctgttgttaaaattttgcactattaatcaaaaaaaattgattaataacatataaagaggaggaataagctatgatatatgttcacgttggtataaacgttacgaatttagagaagtctattgaattttacgaaaaggtatttggtgtgtcaccagttaaggtgaaagtagattatgcaaaatttttattagagacgccaggacttaatttcacgctaaacgtacgagatgaagtgaatggaaatcaagtaaatcactttggttttcaagtggatacagctgaagaaattacattacataaagaacgattagaaaaagaaggtttctttgcgcgtgatgagatggatacgacttgttgctatgcagtacaagataagttttgggtaacggatcccgatggtaatgagtgggagttcttttatacaaaagcagatagtgatgttcacaaaatagaagatccatcttgttgtacgacttctaaagtagtagaaaaaaattcttgttgttaataggagctggaaaataaaatgaaacgtttatcttttctagaccgctatttaacactatggatctttctagcgatggctgttgggattggtttagggtttgtgtttcctagtgtagtagacggactacatacattacaagttggaacgacgtctattccacttgctgttggtttaattgtaatgatgtatccaccattagcgaaagttcgctatgaggaaatgggccgagtatttaaagatgtaaaagtgttagttctatctttagtacaaaactggattatcggtccggtacttatgtttgtgttagcaattatttttcttcctgataaaccagaatacatggttggtctcattatgattggattagcacgttgtattgcaatggttattgtttggaacgatcttgctgatggggataaagagtatgcggcaggtttagttgcttttaattcggtattccaaatgctttttttctcagtttatgcatacgtatttgtaactgtaattccagaatggttagggattgaaggggctattgtcgatattacaatgatagaagtagcaaaatcagtatttatctatttgggaattccttttatagcaggtatgttgacacgctttgtactagttaagttaaaaggaagacagtggtatgaaaaggtgtttatacctaaaattagtccacttacattacttgcattgctatttacgatcgtcattatgttttctttaaaaggagagatgattgttagcgtgccactagatgtggtaagaatagcgattccgttattaatctattttattgtaatgttttttgtatctttctttatgggaagaaaaattggtgcaaactatccggtgacgacaacgttagcatttacagcaggtagtaataactttgagttagcaattgctgtagcagttggggtgtttggtattcattcaggcgcagcatttgcagcagttatcggaccattagttgaagtacctgtaatgattgcacttgtaaacgtcgctttttggtttaagcgtaaatattttaatgatcaaccagcataatttaaaaacaaaggcggaaaacaacatggaaaacaaaaagacaatctatttcttatgcacaggaaattcatgccgaagccaaatggcagaagcatggggcaaacaatatttaggtgataaatggaatgtatattctgcaggaattgaagcacatggagtaaatccaaatgcaattaaagcaatgaacgaagtaaatatcgacataacaaatcaaacatcagatataattgatgcaaacattttaaatagtgctgatttagtcgttacgctgtgtagtcatgcggattctgtttgtccatctactccgccgcatgtaaatcgtgttcattggggatttgatgatccagcaggaaaagagtggtccgaatttcaacgtgttcgtgatgaaattggtgaacgtataaagcgattttctgaaacaggggagtaaataaaggaaagagtcaatcttctatcttataggggattggctcttttttattatgtatttcatttacttatcgcatcgctttaaaaccactcttgaaaataatacagaatattatgtgaaagtggtaaagttagaatagaacagtttaaaaaaggggatgtaacgtatgatctgtgaactaagcaagaatgatttttataggtgtaatagtttagtgaatgaacaaggtcaattagaggtacgtgctgtaattgcaggagtgaaccctggtcgtatatttgtagataatagtactgctcctaattcgggacttatttggttaggtaataatgatggattcttcttcattggagattctgcaaatgaagagtttaataaagaaatgaatcattttattaataatgtaatagtacctgaggcgaggaaggtaggactagattgctttgaaggaatcggtaatcattcaaaatggaacaaaacaattgaaagaatatttcagcaccgtaaattaaagagttggaatcaaagagtgtatacgctaagaaaagaggattatgacaatcatcatgagcctaaatttgaacagggatatactgtgctgaaaatgagtaaagctctctatgaaaataataacaatacatttaagaatattgattttttacaatcaaaaattttagagttttggtcttcaccggattgttttttcgatgagggaatcggttattgcgttgtttatgatgatctaattgtaagtgtatgtttttcaggttttgtatttgcaaatatccattgtatagatattgaaacgataaaaggtcaccaagggagaaaattagctcaaaagatagcgcatagttttgtgaaagattgtttggagaatgatattattccatattgggactgtatggaattgaacaagccttctgttgcagttgtggaaaatgtagggtttacaaatgtatttaactatgtgggatattattttttatttgaataatctaggtatactttacaatttacactttgaggttgcccaatcattatatatatctacaatttaaaaaagaaagcatatgaggtgtccgaaaatgaaaatacaaatagtattgtttgatggtttcggagaacttgtctctttcgcaccgtttgaggtactgaaaagagcgatagaagaaggggctccatttacaattgaattcgtttcgagtgaacaaaaacaagaagttacgacttcatttggagttacggttaaactacatgattttttacgaatggataataggccagatttgttaattgtacctggtggtggctggaatcataaagcagagcatggggcacgaaagcaagcagagcttggtactttgaccgaaatgattagcgagatgcacaatgcaggaacaattgttgctggtgtgtgtacaggaggtatgctattagctgcctctggtatattgaacggtcgaaaggcaacgatgcactatttggcacaggatgaaatgagtgaatacggggcagagcttcttcattacagaattgcggatcaaggggatattatcactgcaagaggagttacttcaggagttgatttgggactttggatcacggaaagattcgcaagccctaaaattgcggctgccgttgaatacagaatggaatatgagaggcgaggtgttgtttggaagtaatttgacttcttttttatcccgcattaacgggcagtaagactcccaccacaaaattcaacgaatgggagggctgcccgtaaaaaaacaatggatatgtactaataatcagtgggggtgacaaaattcctactgattaaagtttcattttataatttttcaccttattaaaagttgatttgttagaaaggataatcatttattgatataatgaatggatgcgtggcaggaaatagatagaaagatactgctagtaatttatacttaaaatgtagggagattgaacagagttatggggacagaaaaagaaattagttccgctaaattaatatggaagatgacgcgcccgcatacattaacggcgacgttttctcctgtaattttaggaacagtggcatcactttatgttgccaaaattgattggctgttatttattgcgatgatggttgcatgtttagcattgcaaatagcaacgaacttatttaatgagtactatgattttaaacgtggattagacactgctgaatccgttggcatcggtggcggaattgtccgtcatggattgaagccaaaaaatgttttaacagttgcgcttttattgtatgtcgtagcagcttttattggcatttatatttgtatgaatagtagttggtggttagtggttattggtttaattgggatggcagttggctatttatatacaggtggtccactaccaattgcgtacaccccgtttggagaattagtttctggattgttaatggggacatgttttgtactcattgctttctttattcaaacgaatacgataacgattgaaagtgtattgatttccattccaattggaattttagtcggtgcaatcaatatgtcgaataacatcagagatatcgaagaagatattaaaggtggaagaaagacattagtaatcctccttgggagagagaaagctgtggtaacactagcggtagcctttttcattgcgtatttatggattgccgtaattgtattaatgggttatataagcccttgggcattagttatgttcctaggtttgagaaagccgatttctgcgattcaaagtttccaaaaaggggcaaaggatcctgggtatatgcgcatcgcaatgaaatcaacagcgatgacaaatacgatttttggcttcttattatcagcagggttattaattagttatttgttttaaataaaaaatatggttaaataacttaaccccagtttctcaattttaatatagagaaattggggtttttattttgactttgtttaatgttaaaaacagtttcatttgaaatgcaaataccaataaattgcaacttcatcattttcaatatccaaacctttataaacaagaaaatcacacccaccaattacaaatccgcatttttcatagaacttacatgctgcgacattattattttgcgtttcaagcatgatacctggcatattgcctttttttgcccactgctttgcttgatcaactaatcttttaccaactccgagtgtacgatattttttatctaccgttatatcttctatgtaagcatagtggttccaattctttttcaataccattaatccaatgatttggttatgtaacagtgctatgtaaatgacttgattaggtttatttatatattcattgtaagccagttcttcattatcatcttgattttgtaaataacttttttcataactcggaacgtcttctactgtatattctatacgtttatttcctttggaaagagaaagaattaaccgagcattcactataaaactgtcatcaatctccgggagattatctaaatcatttgtttctaactctctaattacaaggttcatcggggcacctccacataataatatttcttctagttcttcatttggttcaaatgaattccaattacaaaattataatagaatttcaatagtacggctatctttgtattttatctttataccagcatgttgttatcttgatatgaaaatattgtttagaaagagtagtatcttttattttggatgtatatccagttttcaaatttaactgtagtagagaaacaaatatttttttaaagagtggatgccatacgttattctttaactaaattcgacattatctgcattttatcttcaccttcctctattaatctatttattgtaaacatcagctggagttaatgctcagctgtataaataatgaatataaaaattaatagggaaaggatcgaaaaataatgaaagaatcacaaagtaagaaaaaaacaagtcgactaactaaggtaataatatctctaggagttgttttagcaacgacctttttcaccttctttttaataggaaaatggaactctatcccagcgaagggaatagctaacgaaagtagtaatcaagttaacacgcaacaacaagaaaagaaaaaagaaacaccaccagcaaaacagaaaagacctgatggaaaaccggtgggaaaggttgtttatttaacattcgatgatggtcctagcgaactaactgggaaatttttagatgtactaaaagagcaaaatgtcgcctcgacattttttatgcaaggtagcaatttacaaaatacaggttttcaggaaaacgtaaagcgagcagtaaaagaagggcattatattggtgcacatagtatgacacataatagtgataagctatacaaaaaaggacaatttgtaacggagatgaaagaaacgttagctcttattcataatattacgggtacaactcctaaattagttcgtccgccatatggatctgcaccaggattaaagggcgaggaaattcgtaaccaaattgtagaagcagcaataaaagtttgggattggacaatagactcaaatgattggaaattaaaagataatccaactcagattatcgataatgtaaagaaacagacaacagaagaagtagaagttgttttaatgcatgaaaaggcgcaaacattacaagctcttcctgaaattattaaattttataaagagaaagggtatgaatttggtgtatataatgacgaggatcattttcgtctaaacttccaaaaagatcaacgtctatagtataaacatagttattttaaaaggtgtttttattactaaatcaataattaagcaaaagtcgatttcctattttataaagaaatcgactctttcgtttatgtattatgtcacaagagtttccttattttctccggaatgtcctttttagaaatctatgcaacagagcctttatagtaagagtatcttgttgggaatgatcaaaaaaatctatattgtaatataaaaaatcgctatgatatgaaaggataccatacaacaatcccaataaattcttctcaataattgaaaataaaatcaatccggattattatattgttattgtaaatttattttattgaaggaggatacatagatgaaaagctcaaaaggctctattgaatcagagataagcaaagcaattactcactgggaaaaggactacctaggacgcgggtctatatccgttaagacagatatattacgggatatgattatcgtaaatttacaaggtgttttaacgccggctgaatatagtgtttgcgaaacaaaagacgggatgctaacgataaagaagaatcgttcggagctagttgaatctggaattgatgatctgaaagagattatactagaattaactggagagaaagtgaaaagctttcatacggatataagctcccgtacaggtgaacgagtaatgatttttaaattgcttcataatcttgaggagaaattttaaaaataccttaaggttagtggaaggattaagaaacctacaagttttacactttattaacaggctaataattaaaaacttgaagttatttaggtataataaatcttaattctgataactcttaaaaaacggataaagaaattgacaaactgcttaatatggtttatcttataattgttttaaaaaattgatagatgctcattttaacagtttgctataattaaggctttagcatttttttaatatgtaatattgactaaatgaaaaagtttcttaattaaaagatagcgtataacataaattgatatattgattgcataatctaggagatcagaaatatacatttctttttaataggagtaatacatacattattatcctctataaaatgggagctcttcaaaaaactttattgaagttagttgaagggaaaccgacaatctccataattcaatgatgatataaaatcattgaattatggaagttgtcggttttttttatgggaaaaaacgatgcactaaaaagagtgaatgaaaattgaaatttaaaaaactatcgtaattaaaaggaatttttataggttattttcgcttagaagggagtatttaacatgttaatttcgctgagttcatcaacactgttaactttattttttatggcgcttagtgcttcttggctaagtggattattgtttttacatgcaaggatacctttacgttttgttcatatccatattggtatcgctgctttaccttcattggtttctttgctcgcacttgttaataacaatggagatagagttgtggggccttggcatctagatactttagcttggttaatggctttctttgttcttacaattggtttaatcattcagcgtttttctgtacgttacttaatgggagatcgctcatatcgaaaatactttgtactttttacatttactacaggtgtatcttcggttgcatggttaagtgatgatcttcgtttcatgattatttgttggggagcaacgcttataggattggttctactcatagggctaaataaagggtggaaagtagttagtgaagcaactaaaatctctggctatttatttacaataagttggattgcattgctatcagctatcatttggctttttcaagtaactggacagtggcaattaacatcagttttaacgaatgaaaatgtagcgctacatggaacattggagagaacaggaattaacttattaattatattagcggtgatgattccagcagcacaatggccttttcaaagatggttaattgagtccgctgttgctccaactcctgtttctgctattatgcatgcgggtttagtaaatgctggcggtatcatgttaactagattttcacctctttttcatgatgatattgcacaaataattttactaattttctctagtatttctgtcttgataggtacaggaattagtttagtccaagttgattataaacgtcagctagtaggttcaactattgcacaaatgggatttatgcttattcaatgtgcattaggcgcctatttagcggctgttattcatttaattttacatggtttgtttaaagctacactgtttttacaagctggttcttcagtgcaacgttttggggtagtgaatcagtctaatgaaaagatgtccaatttatggattagagtcgggcgtgttttaggattatttatagcaattactttctggtttatgacttctggagaggggtatcaactagttagtgcgttaatcttaggctggtcactatacttttcatggaaacagcttgttgtttttggagagggaagaatgggacgaattgctggcgtaattgttttgattggattttctctcatttactttaccgttcataattctctttataaatggttgcatactgatatttatcaaagtgttcaaccttcagctccagccgttatctttgttatatgtattttactatttagtagtgttactagtactttcgttactcgtcatcaatcttctactttattcgctgtactttatctttggttagttcgagtaggtgaggcgagaagaaaatcagtagaaagtcacccaagctatctgaaacattatgtatcaaagggaggtaattcgtgatgagcatatcgtcaatattaaagaaagatacaaacattgatatgcaagaaaataatataaatgatttagttgcatctgctagccgagttattgcaccactttggcctatctctacgtttgcagctcaccacccttggatgggacttgaaaagcaatcatttgaacaagtcgcaaattggctaaaagaagctcgtaatgtggatatgtatcctagtacttccatgattcattcggcaaaagcgaaaggtgagattgaggaatcatttttacaaagtagtttgtctcgttggctggattcacaatcttttcatattccgcgagagaaagtagagcgattttgccaagcggctttaaagttagaaaaattaccttctagtctattatcatcgccagaattaaataaattggcagaagaaatgagttatataaatacagcaaatatgaaagcctctgttatgcagccaataagttcgcttatagagaatcaaaatagtgaaaacctatctgatattcttaattatcatatcattaaatggtgtaaattatatcttgatgactccggatcaagttggacgatgccaaatcgagagaaaggtttttatcgtgcatggcaacaccttattacatttgatccagcgctcagtaaaaatgagcgtaaagttttaaaagattggccacaagatgccgaagtagctttagcgagagcgttatttgaactaggaatttctgaatctaacatacaagcttatcttgaagggcacttactttctttacctgggtgggcaggaatgatacgatggcgctcacaacaatcaattcaggaacaggggcttttaatagaatatttagcagttcgaatttctatggagctggctattgcaaaaccttatttatctttaaaaaatcaaaaggttgagaaaaaagtttcgatcgtcccacttatagcttcttggatctattgggggaatatttcaacacgggaatggtcacaaatgtctgcagctgaacaaagcgaattgttagcatttgcatatcgttttgatgaaaatattcgcaggaaactttggctggaagcttgggaacaaacgcatgcagagcaattaagagagaagattgcttctaaacaacgcgcaaccaatgataaaaagcgtgtattagctcaattagcattttgtattgatgtacgttcagaaccgtttcgtcgccacttagaaaaactaggtccgtttgaaacgtttggaatagctggtttctttgggttaccaattgcgactagtgaactaggtagtaatgacagccatccttccttgccagttatactgaaaccgaagcatcaaataaaagagcttacagatgaaaatgaatttaaatcttatgagcaacgtaagagggtaggcagttcggtgcgttatacatttaaaacgatgaaacagaacgtactgacaagtatggcgctacctgagttaagtggtcctttacttggtctacagatggtgacaagaagctttgtcccaagaggagttggtggtttcattcgtaaacttcgtaaaactatgttacaaaaacctgatacaacattctcgcttaatcatgttcatgacacaaaaggtgagatacctatcggttttacgaaagaagaaaaagtgaactatgtgcgtcaagctttaaaaatggtgggactgacagaaaaatttgctcctttagttgtaatgtgcggacatagtagtcaaagtacgaacaacccttatgctgcagcacttgagtgtggtgcttgtggcggagcagcaggaggattcaatgcaagagtttttgcgactttatgtaatcttccagaagtgagagaggcgttgtttgctgaaggcattaacattcctaaggataccatttttgcagcagctgaacataaaacaacagtggacgaattggaatggatttacgtcccagaactttcgaaaactgcgcaagaagcgtttgattgtatcgagacgattatgccaaatgtgagccaacatgcaaatagagaacgtttaacgcaattacctaattttaaaacgaaaataaaaaatccgagtaaagaggcacatcgatttgcagaagattggagtgaaatacgtccagaatggggattagcgcgtaatgcatcttttattatcggacagcgtgaattaactcaagattgtgacttagaaggcagggctttccttcataattatgattggaaacaggatgaaagtggcgatatattagctaacattattgcaggaccaggaacagttgcacagtggataaatctacaatattacgcatcaactgtagctcctcattattatggtagtggaaataaaacaacccaaaccgtaacggcgggtctcggtgttatgcaagggaatgctagtgacctgttgccaggcttaccttggcaatcggttatgcagtcagatagtgagacgtatcattcaccacttcgtttactaattgtcattcaagcacctattgaatatatagaacgtttgttaaataatgatttcacatttcgagaaaaagttcaaaatggatgggttagacttgcaagtgttgatccagagggaagctggaaaaactggtaacaattattattgttactagcttaaaagtttcataaatacaataatgaagaaggagtgctccatatgaattcaaagaataaaaaagttttattattaacagacattgaacacggaatagagcctagtatccaacaagtaactaacattcaacaagaaaacatgttgactatacacagctatgattctgtaattgtacatccttatggagatataatgagatctattattattgctatttatcaagaaaatgttaaagaaatttttgttgtcggaatagaggataaagaaacttcttcagttaatctacaaactcaacgtgatttcataaaagataatatagaattagactatctctttaaaaattgcatgcctgaattttcaagtggtagccttaatcaatggctgagtgcacaaaaaaatgttagtgaaaatattgaaaagagtatagatatgatccgtcatcatccattagtaccttctgatattgaagttcatggtttcataattgatagaacgggtgaaaaagaaacggttgttaaagtttttgctaataaagtactgaaacaaatgcattcttatgtgtaagttatcgatagataagcaacttttatttggacttgtgtcctttacaaagagcaaaagaaatcttctataaatggggatcttttgctctttttgtttgaatttttaatgtgttttataggagatacctaatatgtacataataaaaatatataactttttgcataaaattttaaggacggattagcaggtgataataaagttaatcgtaaaatagaagtgtatattgtgattgatcccgcattaacgggcagccctattggtgagggctgattaaagtttcactttattttaagattattactaaaaagaatggagattctttaattatgagaataaaacagttaaaacctaaagtgatatggaaaaaaagaatgttgctaactctttttattgttttcggattgattattgcgggggttgttttttggaatgtttcacctattccgaaagcgtttctcataaaaaaagcatttgaaggtggaatgtttgttcaatctaataattataaaaacgctctaaaagagacacgaattgttaaagatatcaattataattctaaatttcctgatggtacattagacattatttatcccaaaaattttatagggaaaacacctgttattttttgggtgcacgggggtggatttgtaggtggagataaatcagacattactggttatgcagtagaattagctgctcgtggttatacagtgataaatataaattatgctcttgctcctaaaagaaagtatcctacaccagtactacaacttggtgaggcttatgaatatataaaagcaaatgcaaagaaatataatgtaaaactagatgacctatattttgcaggagattctgcgggagcgcaaatatctggacaatttgttactattcaaacatctccagattatgcgaaattaaccgggattgacgctgttgttgctccttctacaattaaaggtatattgctattttgcggcccgtataatatgcctgcattagctaaaatggaaacatccaaagaagtgcaagactttatgcgtactactggctgggcttactttgggaaaaagaaatttgaaacattacctgaaatggaaatcgcctctatttataaacacgttacaaaagattacccaccaacgttcatcacagatggaaatactgcatcatttgaagagcaaggtaaagcattagcttctactttacaaaataaaggagtacctgtagatacacttttctttgataaaaatatctctggcgagttagcacatgaatttcaatttaaaatgaacactccagcaggtgaagaagcttttaaccaagttcttaaatttctaaatgaaaataaataatatatatactattaactttttataagcctagtttaataccatataggggtgaacaaaatattgcattaataatctaatggtagcaaaaataaatttgataagaagtatatagtaagaatgatttggagatacagatggggatataactattttatttaggacggtgcactttaaatggatttacagaaagggaaattatattggaacacaactttttctaatacatcttcttatcctcgcttggaagaagatataaaatgtgacgtactaataataggagcaggaagttcaggtgctcaatcagcatactatttgagtgaatcagatttaaatattgttgtcgttgataaaagaaaggtaggacacgggagtaaccttacaaatacagcacttattcaatatttaggtgacaagatgttttttgaacttgtaaatacatttggagaagagtatgcagttaagcatatgaaattatgtgaacaagctattaatgatattgaatatgctgatcaaaacttgccttattgctctgattttaaacgacgtgacagtttatattatgcaagttatgaagaggatataaagaaattagaaaaagaactgtattatttacataagcatgattttaaagcgacttggctatcagaggaacaaattggacagagatatccatttaaaaaacgtgcagctatttatacgtataatgatggtgaaataaatccttataaatttacacatagtttattagaacaagctgctaataaaggagttcaaatttatgaagatacagagattgttggcaaaaagttagagaaagaatgtgctatcttttatacaaaggggggcaattctattactgccaataaagtaattgtggctgcaggatatgaagggttggaatttaaaaaggaaaagaacgctacactgattagctcatatgcagttgttactaatcctgtagaagatttatcttcttggtataaacgtactctcatttgggaaactgcgagaccatatatttatatgagaactactgcagataacaggattattataggtgggttagatgaagatacaaacattgctcaagaaagagattcaaaattaatccataaaaaagagaaattagtaaatgaatttaataagctctttcccaatataacagttgaacctgaattttatttaagtgctttttatggtggtactcatgatggtttacctataattggaatgtatgaagagtttccaaattgtcactttatctatgcgtatggagataatggattagtatatagtatggtgctttctaaaattgttcgagatataattattagcggttcaagtccggatttgaatttatatttacaaactagaccaaaactaaatgagtaagctacatgtatgcaaaatcatagtagtaacgagtttatttagggttccattgtaaaaaaacgctattttaaatgtattagtttaatgtgactatttgttatgtttatgaatgcttaaataaagcatttataaacaatattatttgttaaacccattcatcttactaatttctgttatttgtataatccattctttttttaggtagggtagagttgcttggatatgatgatattcccattcttcctcaatggtaggataaaggttaaataagtatttttcttcatcatttgttacacttgctttaggattgccagtgagtttaaaataaatgtcgcaccatccgctatagtttgttaacataaataaaaaattaggacatgtgaattcgatgaggtatatttctttctctaattgaatatctgatagtaattcccttgcagtctcaaaagtaggcttctttttgtaaccattgcatgaatgccatgcccaaatggggaaatctatagtaaagtcaatacctttctgtttcatgtgtcttacaatgtatttatatgctgtgaaatcttctttactaacaaaaataggattggctataagcttaccttcattcaaaagtgtatttatagcatttttgttttgaaaagtccataggattgttgaatcaataaatgtatttaagtttgattgtttatcaaattgttttttcatctttcgctccattttcttttttattttgcagaattaagaataaatatgactaatcggataataagaaatacctatgctagatacaattgtaaatgcttatttaaagtaacagcaaggaataacctttgtatatagagtgtacaatacatgcaaaacaggattaaagaagattttaaatataatatgaaatagtacaaaataagaatttgatacatcttttatatataaactattaattgaagtttgtaattacacattatagttagtatactaactatataattagtgtactaactatattggaggttatatgaataatttaggctatttattacacaaggtaagtataatgacgaaaacagaattatcaaatcaattaaaagaatataaaataacagctcagcaatggtctgtgttaaaggatatatctctttatccaaatggaaccaccccggctatgattgctgaaaggctcttagcagaccgtccaacagtaaccggaattatacaaagattattgcaaaaagaatggattcttataaaacataatcctaaagataaacggtcacatttaatatttttaacagatgaaactaaggcattaatacaggagatagaaaatgtaagcgatgaagttataaaaaatgctacagctagtattcctaaagaggaagtagaaaatacagttcgagttttgcaaagtatgattcaaaatttacaaaaaaataaagggtgattaaaatgattttagtaacaggtgctacagggaatgtaggaaaagaggttgtaaaatgcctaataaaaagaaatgctactttcaaagtcacaacgcgcagtagagaaactgaaggagtgtattttgattttgaaaacccctcatctgtaaaggcggctttaacaggtgttactaaagtctttctaataagaccaccacatctagctgatgcaaaaaagtatttccagcctgttgtagatgccgcaaaagaaataggtataaaacacattgtatttttatctttattaggtgtagaaaaaaatccgatagtacctcatgctaaaattgaagctatgataaaggcttctgggatcccttacacattcctaagaccgagtttttttatgcaaaatttattatcacaacatggtgatgaattaagaaatgaaaaaataattgaagtacctgctggtaaaggggaaacaagttttatagatgtacgggatattggagaagttgcagctaaaatattaaccgaagagggacatgaatttaaagcttattctttaacgggaaatgaggcattaacatattatgaagttgctgctattatttcaaaaataataaataaagatattacttatacaaatccaagtatatttaaatttagaaaaagaatgattcaaaagggacttaacagtgactttatttgggttatgattggaatatatacaactgcaaaattagggttagctaaaaaagtcacatcagatttatcgaatttactagatagaagtccaataactatggaaacgtttgtttacgattacaaagaattattaatataataatgcaaaagtaaaaaagaggattattcacataaagaatctattatgttttaagagtaagaggggatagccatgcaaaacaaaattatcgttatgtttcaaaaagattttcgtttatatgataacccagctctatttgaggctgttcagtccggggaggttcttccggtatatgtacaagatgaaactttttcaataggaagtgcggcaaagtggtggttacaccatgctataatagatgtccaaaagcaacttaaggcattgggctctactttaataatccgcaaaggaaatacacaggaagaaatactttctctcataaaacaattagatataacggctgtatattggaatagttgttatgatccagacaggttaaaatctaatcaaaaaatgaaaatgatattagaagataaaggtattatttgtaaggaatttaattcgcatttattattagaaccgtggattataaaaaagaaggataacactgaatataaggtgtttacgcctttttacaatgcatttcaaaagcaggtaatacctaaacctattaacagagtgcagagtataaagtggggaaactctttaccagcaagcttatctgtctcagaattacacttgttgccgactataccgtggacatctcatatggaagcaatatgggagcctacagaggaaggggcatacaaaacatttaagaaatttttctctagtaaattagcctcttatagtgaaggaagagattttccaaatcaaaatgtccattcgatgttggcaccgtatctttcatttggacaaatatcagtaaagctaatgtttcattacttaataaataaaagtactgaaagacaatctagtctctttgaaaaacaagttaatagctttatacgtcaattaatttggcgagagttttcttattatttactataccattatccatttacagtatataaacctcttaataagagctttgaacattttccgtggaataaggaagaggagttattaagagtatggcagaagggtgaaactggttatccgtttattgatgcgggaatgcgagaactatggcaaaccggttttatgcataatcgggcaagaatggctgtagcctcttttcttgtaaagcatttgttaattccgtggcaagaaggtgcaaaatggtttatggatacactactagatgctgatattgcaaataatacaatgggatggcaatgggttgctggaagtggagcagatgcatcaccgtactttcgtatttttaatcctatcacacaaggagaaaagtttgataaaaatggagagtatataagaagatgggtaccagaattaagagatatcccaaacaaatatatacataaaccttgggaagcacctgagcatattttacaaaaatccaatataaaacttgggaatacatacccttatccgattgttgatcataaggcagcacgagagagagccctttgtgcatataaaagtatgaaagaatttatataaaatacacgagtcaatatgaatttgatatgtaaaagttataatgtctatttgcgtattaaagttgtattcattgaaagagtatacgaatcatatagagtttctaaaaccttctattaaaaaggagaatgtttatgaaaaaatctagtattatagtatttttactaacatatggtttgttttatgtttctagtgttttattccctattgatcgtacttggtatgatgcgttagaaaagccgtcttggacacctcctggtatgacaatcggaatgatatgggctgtattatttggacttattgcattatcagtagcaattatttacaacaactatggatttaagccaaaaacattttggtttttattccttttaaattatatattcaatcaagcgttcagctattttcaatttagccaaaagaatttgtttttagcaacaatagattgtttactagtcgctattactacgttgcttctcatagcggtttcttccaatttatctaaagtatcgacatggttgctaattccatattttttatggactgcatttgctacatatttatcttggaccatttatagtataaattaaaggcgtaaataaaaacttgagcataataaaaatgctcgagtttttatgtgtgttaatgataatccgaaatatggaatatatacatcttatggaggtcatctttgtgaagaaatggataaaaattacgctgtactctttactagctattttaattataggaagtattacttttttgacttggtctcagtttacttataaaccgacgcaagaggctttgtcgttagtagatgataaaaaagatgaagataatatcgtttttggagcgaaagatgcgaaagtaggggttattttttatcaaggagctaaagtagaagctgaggcttatagttacttaggagaagctcttgcaaaagatgggcactttgtagtaatgcctcagttaccattaaatttagcgatacttggaataaatgaggtagacagtgtaattgaaaagtatccggaagttcaaaaatggtatgttgcagggcattcaatgggaggagctatgatttctaagtatgcctttcaacatgaagacaaggtagacggaatcattttcttaggttcgtatcctgcagatgacttctctacgaaatcgattccgatgttatcaatttatggggaagtagatgctttagcaactgtagaaaaaatagaaaacaataaaaagttcatgtccaaaaatacaactatgcacatgataaaagggggcaatcatgctcattttggtatgtatggtgagcaaaaaggtgataatgcgagtttaattacgccaaaagcacaacgagatgaaacagtaaaagtaattgagcaatggttattggaacaatgataacgaatttaataaatctaccgaaagaattatccaaacggtagatgggagagagaataaagagccaaatcgtatgaattggctcttttatttatttgctatctccaattgtacccttattttctccggaatgtccttttcagaaataacgtcgtaagaatagacatactttccttttacatgaatttttaagtaagtttttcttctaaaatcattaggcgtgttcgttccaattttatattctttttcattgcttaattcatcaacaccttttagtgagtacatagctcttcctttatgatgataatctggaacaccatatcctttcgcaacggcatatacatttttttcttcagcaatcggattaaatctgtctaaatctccacgtaatatgaaaggtagtaagtatatagggaggcctattcctagtataaaaattacaaatttcttcatgaacgtttctccttttgttaaattacttatttttaagtataggaaaaaattcttatgaatttagaagtgaatttcttaagtttttcttaaataggtgtttaaaggagggataacattgtatggttattctttcgtgcaaatcgtattattttttatttatatcttcgtggcttttatgcaaaacacaacatttctagatgaaattagatctccttatatatattagaaaatgtattttgtgaattaattatgaatatattttattttaaaaaacatcccttgataaatacacagagttattgtaaagtgatgataattaaaatgtatattgtgtgaaaacgataaaaggaaagagtaaaagtagtttttcttttagagagtcggtcggtggtgtaaaccgaagatggggaaataaaccaaattaggttcaaagatggttcgtatgctgacattatttttatggctctttatataaaaataccgagtaaccactcattctaaggatgagtggttacttgcagtttgtttaaatagagaaatattgctaccaaggaagcaagtttatatatgcggttctcttccttttatggaagctagtattaaaattttgtataaatgggaagtaccaaaggaattgattcattatgaatcgtttagccctgttgcaattataggtgattaactaataccggataggattataatcataataatgtaaataaatagttttttgcgatatttcaatagtgaagtatcgtttttcattgtataactaaagcccagctatggattctgatgtaatgttgaaaaatgatcccaagtaatgatttgtctgttgcaatactaagtaactatgacgaatttgaatctaaaaagtatgctaataaaatagcggaatttttttaaaaaaaagtaaaaaacaatagagcttagatttgcaatgataaatgttttttcattagataattactttaccgataatcgagatgtttgcggatacatttattttttggatacataattatatttagagaatacccagttacagtatttgaatttttaataagaagggatgcgaaggaatgaactcacagagacaaggctatgtaggctggtggcaaggcgggcacggtggtggttggccgggtggacacggtggttggcaaggcggacacggtggttggcaaggtggacatggtggttggcaaggtggacatggtggttggcaaggcggacacggtggttggccgggtggacacggtggttggcaaggcggacatagtggttggcaaggtggacacggtggttggcaaggcggacacagtggttggcaaggcggacacggtggttggcaaggtggacacggtggctggcaaagtgggcatggatattaaaaagaggctataaaatcattttttatgcaaagtttgtatatttagtatcgttgtatattttcatttgtatagtaagtatatagtgaaaacagcaaaaaattctgtgaagtaagaattccatccgaaaaattaaagcagcagaaatgtcaaaagaacaaaagacatcgctttttattattcaaggtgaaagagactatcaagttcaatcgaaaatcgaaatctctctatggaaagaacaattaaaagaacgagataacattgattatcgactatatccaaagttaaatcatttctttacagaaggggatggagaaataagtaaaccggatgaatattatagtcctgctaatattcttgagtatgttataaatgatattgctgcttgggtgcaaggaagatcgcaattaaattagcaactatatgttttaataaagactttctttctgtaattaaactagaaacattattagggtatatgttttttagcactcttttaaaaagagtgtttttttattttcctttgatttaattaacgaaaaaaatatcttgtactccttttgtaacttttttaaatcgaaattttctataaaacaataggcttgtcttccaaataaagcgttatttgtaacactgttatcaaagcaaagtgctcgtgacatttccttgatattcaaaaacattaataacctattatgtgaagttttttgaaaatttaggtttaacatctttaaaataggtgtattacatattacataacaactaaataagaaaataaaaaatctaagggaggaaaaatacgatgcataagaatgaaagaaaaccggtggtttatgaatatcaaaatgaacaggaagtagttatgaaagtaaaagagctagaattgcaagggattcaccaagatgacatttacgtcttaacacatgaaaaacatataacaaaaaagattgcggatgatacaaacacaaatacgattggagtaaaagaacaaggattgggcacaagtattatcaactttttctccaaaaaaggggacgagctccgaaatcaaatggaggaaatggggttgtcgaaggaggaagctaacttatatgaagaaaaactagatcaagggagaattttacttctagtaacagatgaaacactaacggcgagtgataggcagccgcaaaactatcattctctctaatagattgcaatatctgataaatagataagttaattattttaggttgtagcatggaagaaaataaaagtagagaagggtgagaaaaatgaaacatacaatatttaaatatgctgtgattgggattacgaccggagtcatggtatctctgttaaaaaaagaaaatcggaaagctatacaaacaaaaggaaaaagcgtaaaagacaaactacaagaaggaaacataaaggaaacattagagaaggtaaccgagacaagtaaacaattctctgtaactgcagctaatgttgcaaaacaaacattaccacaactgcttacagccacaccggttgtcatttctactattaaagatttaacagaaaacgaaaataacaaaaagaaaaaagatgaaaaggataatgaaataaaacaaaatagtaagaacctagacggagaaaaaacggaaaatgaaaagaaatatgtgaaagaagggaaagaagagagtgcttagatttaattctaaaaagagaaagtgaggaaaaaagtatgaaatctctgtatgcaattgatgtaggaattggttttactaagcgggcatatcgacaggatgtagattctgaggtgacgattaagagtgaagctgccacactagctcctgtacctaatcatgctgaaagtgaagatttaacaaaggtaagttttatagacttagactttgcatactacatgggaaatgaagcacatcaatctgacgcttcatttcttcctccatttgacgaagaaatagaaaattattatgaaagcgaacagtttaaacaacaaatatttggttgcattgcaaaggattataaagaaaatgtcgtgttacctttagttgttaccgggcttccagtcacttgttttggtagtcagcatgagcaattacaacgtgcactaaaaaaagaaacttccgtacaaattgatgggaaatttattaatattacggttgaaaatgctttgattcttcagcaaccgatcgctttacatgcctatttcttaaaagagggaatcattcaggaacaagatcgcatcttaattattgatggtggatttcgtacattagaaatgacagatatgaaacagaatgtcattttaaatcattatgagacggaactaggatgtagcaagcctttgaaaaatattaagaatatcctgcagaatcatgcgggtgaaagtaatcaattgcatattaatgacatgccaaaaatattagaaaaaggatatggagataaagaagaaaattatgagacaagtcaggtggatattttaattcaaaaagagttggatacacatttccaagacatcatgcgtgtattacaagaacaatttaagttagaccagtatgatactattatttggacaggaggagtagtagatctccacaaaaaacaaattgaaaaaatgcaaggtgaaattgtttctttccgtatggtagacgcttcaaaagaggccgcgcttcatggatactatattattggaagtcaagtatttgaggacatcaccaatcaatctgcatataaatccaaattataatgacgaccgaaatggagttcgttgaatagacgtgccaaattgtgtggcttcttttccaaatataaataagaaaagataaaaagtgcttgtatagaggaaatgtttaaaattgagaataaaaataactaatatatagggggtcttcctttttaaagaataagacctcctatgcatttattttgtaatttagatgatttaaaaacttttcctccaagatatggatacctacatacaaatttcatattacggatatgattcgatcaaacataaaactatttagaaaggaagaataatatggaatgcataaaaatgacgaaatggagttggtatcatgtgaaaactagtgagcttgaagaaatttcttctataatcccccgtgatgtaacatcttatttccctcaatttgtaaagaaaataagttctccttgtgaaaatggattatatgtttatacgttatcaccaagtcaaacttgtgtatatggttcgtttttatatgatcaagataaaaaggacgccaaaattcaaaaatttcttcattatttcgtagctcatgggatactgataacggtccaagaaaaagaggaagaagattttcaagaattaatacataaattccctataggtataaaaaattgtaatagttccgctgaaggactatgtgccatcttatcgatatttatatctcactatttacgaaaggttgactattttgaaaacaatttcagaaatgtgttatgggatttttatcattataataacatagcagttttagaaaggatttatcatattcgtcatgaattatttatgaacacacatgtgtttcgcttaatacaagaagtgttacaaggcttggaggaagcttggttagaaaaactaacaaacaccctttgttataaacaaacacacgtaaaattagagcgtggattacaacttgttaaagagtaccaagaagaattagacacgatgattcatttgcaagaagttgtttcttctcatcgtgggaatgaaattatgaaagctcttactgtattaactgctgtgagtacgcctttgacagccttaggagcattatggggtatgaattttaaatacatgcctgaactagaatggaaatatagctatttaatcgctctcttatttattattttcacaacagcgggtatgtatatgtatatgcgattcaaaggatggacaggtgatttattacgagtaaagaaaaagaagtctttttttaaatctaattagtcctgtttataaaaaatatgatagacatatagttaataatatttattaattggggtagtgccatatccctatcaagttaaagttttgatgtccccgcaatgataaaaataaacttggtttccataaaaaacataatattttcatttaaaggctatgaggtgaaatgtcatcatcttcatcacgtttgaccttcaagaaataaaaagttaaactattcttgtactcgaagtactattatagtactggagagataataactttactattttggtatgaggtgaataaatgatgaaagatcggattgccaaaactgctattgcgctttttcatgtaaggggaataaaattcacaatgagtgatttagctcgtgatctaggtgtaagcaaaagtacgctttacgagcattttccatctaaggacgagcttattggttatgtagttgagcaaataaatgaagaagcccaaatacgttttcgggaaattatcgataattcgaatttgaccataccggaaaaattaaaagggattcttttaattgtgcctaaggattttcagcacagcttcgtacgtttactgattgaactgcgacgttaccatccagagcagtgggcaaaaatagaacaaggcataaatgaagaatgggaggtaattactgggctagttgaagagggcatcaatagcggtgttttacgttcaatggacattccagtgctaatccaaacactcaaaacgttaatgaaatcaatttttgaacaggggagtatagcctctaaccaaattactctacaagagtcacttgcaatgatggccgatatcatattgcatggaatcacaagtaaggattaaatagtacttctacataaaaaatgagtagggtcacaataaccatacaggttaacgtagcctcgctcattttttatttttatcccgctttaatgggcagtaagattcctacctcaaaattcagtgaaagcaaagaatttaggtgggagatcaactgcccattaaagtccgattggtgagggctgattaaagtttcactttatgtcgattttacttaagggtaattatactttacagtctggaagatttcggtataatataaaatgagtaccaaaaataatttttcggtactgaaggtacgaattaaggtaatcagagatggaaacgaaaagtttgtaattttaaattgttttttcaatttggctgggatgtccttgaagataaaatacgggtataggaggaatgtaaatggatttttttgagactgttataatcattgtgaattttagtattctaggctgtatattgttttttagtgagaaaataaaacaatggtctgtcttcattctaacagttgccttttgtgtggttggtgtgcagcttatcgtagaagggtatcgctggcagatgattcctgcttatttgtccccatttattttaacaagctgctatctatttgctgaatcaaaaaagaacgttaaaagttgtggggcattcacagtcaagacatcgctactggtcatttatttgactattgcggtcatgcttccttccctcatgccggtagttttatttgaaaaaacgagcggtcccttcaaggttggtactacactttatcattggattgattataatcgagaagaaccttatatgaaagatttgaacggccggcgcgagctgatggttcaggtttggtatcctgcaaaagaaaaaggagagatgaatcgcgcaccttatatccataactcggatgagattgccaaggggttggaaaaatcattgtctattccagcattcgcgtttcatcatctaggcttgatgaagtcgaatgcattcatggaagctcaattgtcagattcagaggaacgttatccggtcctactcttttcccatggtttaagcggttttcgcaatcaaaacacgtttgaggtggaggagttggccagccaaggttacatcgtcgtaggaattgatcatacctatgatgctgcagctaccgtctttccagatggcagaaccgcttttgtacagtcgatcaatttaactgattttgccgaacgagattgccatatcaaattatggaaggaagatgttgtttttgtacttaatcaaatagagaagcttaaccaaagcgataaagataatcgctttacaggaagaatggatacatcccgaattggaatgtttggacattcttatggtggagctacagctgcgcaagtgttagtggaagactcccgtgtcaaagcagccatcaatatggatggtacattatatggggaaaatgttccgaaatctagagttggaaaaccgtttttgattatgaatgcagagactagtgatgattccacggaagattttttagagggaaaagttcgtagtgaccatgcacttgcaggtggtggcatgtcaatggttattccccataccaatcatacgagtttcactgattttcatttgttctctcctttgttacgaagcttagatgaagatccaagatacgttcaccgtattataaacgaattcagtctcgctttttttgatcgatatgtgaaacaggtagacgatagctctgcgcttgaaaaattggactccaaatacccagaagtgaaatttaaagtgaattgatgacaatgtcttttaatatatttgctaacagttgggtatatattttaatcatcaagaaagattgccctctgtagcatacagagggcaatcttttttaaattaatataaaggagtttttttatgtttaatagattgaagtattttcttttatccgagaaagaaatagttgaaactgtgaagaattacaaggaggaaaaaatacatgttttcataataaaagattttttaggggagttaatcttaataagaactcttatatttttaatgtttgttccaatatcaacttttattttttcagttgtaatttttggagctgttttctttttatccggtattaagattaccatttggggcattgctataatgttattggttccaataacattacttttctatatgaatataactaatacatcaattattattactgatttagtgaagaaatttttattaaccataaaatatctaaatccattttactcaatattaaataaaccttggttatttatttttgaattattatttggttttttatatgtcttcgtgctatctttgttttctatttggatagtattacattcattagaaataggtttctctgaatttagttcggaggacaatcgaagtttccaattttcaattattattttgcatacagcaatttatttgtttataagagttcatggccagccttgtaagacaactaagcaaaaaattaaaaaactgaaaatgaaattttatttatggttttgttctatgattgcaagtattgtatatatatttgaatcactctttaattatatgaatggaattcaagcaatttattttatatttgttttaatgattgctttagaaagaacagtgacacattataagaaatttatagattttttagaatctgaaaatttgtatgaaaaataattttagagagaaaagtcatttgaaatataaaaagttatacctactaagtactgaacgagtaaaaaaacgctattctttctctagaatcataggaaaggatagcgttttttatgtctatttttgtatctgatgaactacaactatttgctcaagaaattcaatgttatttatccccgaacatcttaagaaatcttgccagagagtctggtttcgtgcaacgaacctgtaaattccaaacaaaaagtttactcaatttatgagtatgtatggaaaaagaaagagattcaataatgctttatttaatattaatttatacagaaatacatattaaacaatatgtaataatacattttatgatgatttattaaaataaaatgttatatttttgggtggaatatataaatggaggaaatgttatgaacaagaatttaaaatttactcaaatgatgatcggtattagtacgatggcattatcatttggaagtattcaaacacaggtatccgcagaagaaaaagcaccctataatacgttacagatgaaaccgattgggacagaaactttaaaagatgaaattgcacatgctacaaaagcggatggaactttaacttttgaagagcgtttaaaagtaggcgatttttcacaacgacctacttcggtgatgaaacatgatgaaaggcaattaaagcaaagctatactctggcagaattgaataaaatgcctgatagtcaattcattgatacgctatcaagagtttcatggaatcaaattacagacttatttcaattcaatcaagatacgaaagctttttatcaaaataaagaacgtatgaacgttatcattgatgaattaggacaaagagggacatcttttacgaaagaggattcaaagggaattgaaacttttgttgaagtattacgttctgctttttatgtgggatattttaataatgaagtaggttacttaaaagagagaagcttccatgacaaatgtttaccatcattaaaagcaattgcaaaaaatccaaactttacattaggtacagctgagcaagatagagtagtagttgcgtatggaaagttaattagtaatgcttctagtgatgctgaaacagtacagtatgcagcaaatattttaaaacagtttaatgataacctttctatgtatgctaaaaattatacgaaagaacaagctgtatatgaaattgtaaaaggtattgattatgatctacagtcttatttgcaggaaacgaataaaaaacctaatgcaacaatgtggtatggaaaaattgataattttataaatgagattagtagaattgctctcatacggaatttaacaactgagaatagttggctaattaataatgggatttattatgcaggacgtttagggaaatttcatagcaatccaaacaaaggattggaagttattacacaagcgatgaatatgtatcctcgcctaagtggaccttattttatagcggtagagcaaatcaaaacaaactacggtggaaaagattatgatggaaatacagtagatttacagaaaatacgtgaagaagggaagttacaatacttacctaaaacatatacatttgatgatggatctattgtttttaagacaggcgataaagtaacagaagagaaaattaaaaggttatattgggcagccaaagaagtaaaggcacaatatcaccgtgtaattggaaatgataaagcactagaaccaggtaacgcagatgatgtgctgacaattgtaatttataataatccagatgattatcaattaaatagacaattatatggatatgaaacgaacaacggcggtatttatattgaagagaagggtactttctttacatatgagcgtacaccaaaacagagtatttatagtctagaagagttattccgtcacgaattcactcattatttacaaggaagatacgaggttcctggtttatttgggagtggagaactatatcaaaatgaacgcttaacttggttccaagaagggaatgcagaattctttgcaggatctacacgtacaaataatgttgttccacgtaaaagtattataagtggcttatcatctgatccggcaagccgttatactgcaaagcaaactttgttcgcaaaatatggatcatgggatttttataattattcctttgcactacagtcttatctatataatcaccactttgaaacctttgataagattcaggatttaatccgtgcaaacgatgtgaaaaattatgacgcgtatcgtgaagcattaagtaaagatgcacagctgaatacagaatatcaaacgtatatgcagcagttgattgataatcaagataaatacaatgtaccacaagtaacaaatgattacttaatacaacatgcacctaagccgttagctgaagtgaagaaagaaattgtcgatgtaactaatataaaagatgcaaaaatcacaaaacatgagtctcaattttttaacacatttactgtagaaggcaagtacataggtagtacatcaaaaggtgagtctgaagactggaaaacaatgagtaaacaagtcaatcaaaccttggagcagttgtctcaaacaggatggagcggctataaaacagttacagcctattttgttaactatcgtgtgaatgcagccaatcaatttgaatatgatattgttttccatggtgttgcaacagaggaaaaagaaaaaacaacgactatagtaaatatgaatggaccatatagcgggatagtaaatgaaggaattcaattccatagtgatggtacagaaagtgaaaatggaaaaattatttcttatctatggaactttggagatggtacaacaagtactgaagccaaccctacccatgtatatggggaaaaaggaacatatactgtggaactaactgtgaaagatagtagaggaaaagaaagtaaagaacaaacaaaagttactgtaaaacaagatccgcaaacaggtgaatcccttgaagaggaaaaggtactcccatttaataagcttgtaaaaggaaatctgattgctcctgatcaaacagatgtttatacgtttgatgttacagttccaaaagaagtagatatttctgtggtaaatgaacaaaacattgggatgacatgggtactttatcatgaatcagacatgcaaaattacgtagtttgtggtgaagatgaaggaaatgctataaagggaaaattcgtagcgaaaccagggaaatattatttgaatgtgtataaatttgatgataacactggtgaatattcattattaataaaataaatttattttccatatgtatataacggttgttttttaggaggagtctgtcacgataggcttctcctaatttttactctaaaataagttaataaattaggtaattatctctaaaaataaatcattataaacctaaaatattcaattaaaaaatagaagagagggagcttgcgtcttaataaaactaatattaggagttatgtcacatttcgattaaataaaatatcgtaaaatcctcagaataaatttttttgcatgttcattcatttagggtaattctcaactcttaagcagatgtatgtgggggaccgattcatatacatctgcttaaataattagatattttatttattaagttaagcgaaattttattcgtatatgaggaaggcgcatttaattcttttttcgaatgttattcatgttaatcgtattccatcgaatgcgcttgttaccaagtgatgtacataggaatcatccaacttatcaccggttactagcaaccgataaaaaattggtccgtaaatgagatcgatggataattcaatatcaaggttttctttcaattctcctctttgaattcccctctctagaagttgctttgcttgcagtcgacggggcggaaacatcgagtacgatattcttccgccagttttaagtcaacgtttgattttctctttgcaaccagaagtgcgtagtcgcttaaatggattattcatgtctattttctttttgggtggtgctgttggaccctttgtcggaggatgggcatacgcttgaggtggatggagtgtagcattgtggatcggaatcgcttgaatgcgtattcattgatatgtctgagttttatagattatttgcggttattttgaagtttttacatcacaaccagattttttgtctctatcgctaaaagagggcaaaactcaccatataaaatgtgtccgaattccatttagactatgaaaaaagagagcttgcgctagacaacaagccctctaaaaaataacgtaattgagatatctatatattaacagttattttctaacgattccatatgtcttatgttgagaaataaattataagtggcttgataaagctaaaatgaatgattgacataatattttgacgataatataataaatctcgaattcaaggtaatttgtaaaggattggtaattgtgagcgtgattaacgatgagagcttatctttaaagttaattgttatattatcaagggaattacagccaatcactaaacgtattgaaaaggatctaaaaatttatggacttaatgcaactgaatttgcagtgcttgagctactatacagtaaagctgatcagcctataaaaaaattggggacaaaatattacttgcaagtttttgtatcacgtatgtagtggataggttggaaaagaagaggtgaaaccatgtcctaaagaccgccgtgtcacgtatgcatcaattatttcagaaagtattgaattggtgacactaatttttcctcagcataaagaggggattcggcaaatatttggtagtttggactatattgagaaaaaatgataagtaaacagttgaaaaagttaggatattacgcacagaaagtgtaagtttttagatgttatttctgtttagtaatatcctaattaaatataaattaaataaataggagggaaaattaataaatagtagtaaatgtattgtagtacaaaataaagaaattatgtaattgcaattgatatagtaggaaagatagttgttatgcataacgtatacatattgtccttttcattataaatctttcataaagcggagagtgggagtgggtatcaagaatggaattacgtcatttagagtactttattcaagtttgtaataataatagttttactaaagctgcggaagttctaggtatttcacagccgactttaagtcaacaaatccgtgtgttagaaggtgaacttgatacacctttgtttcatcgagttggaagaggtatcaaaatgacagaagcgggtaagctgctatttgataaaggaaaatttatcatgcaacaatttgatgacgtttataatgaaatttttgaattaaagggtgtaaaaagaggtgtaattactataggaggtttattagaggatctcacttatttaacaccttatattatgaagtttcaacaacattatcccaacatcgttgtaaaaattatagaatccgaagttgctgtaaatcaaatcgttgataaaaatattgatataggcatcacgcgtagtgctcaaattccagacacattaacaagtacccttttgtatagcgaagagcttgtccttgtcattcccaaaaaccatcctttgaatgaaacatcatttgtttcttttagagaattagtagggctcagtagaataatggtttcatgtagttgtcgtgaaactattaaaatatattgtgagagtttagggctatctttatctgaagtaaatatagaaacaaaatcttccatttctctattgagccttgtatgcaatggacatggggttgctataatacctctttcactagttgactttgttaataatgatactttgagcatagttcgtattattgatccaacaccaaggcaagatattaatcttattcactttgatgataaatttttaagttttgcagcacgtatctttatgcagaagttacatgatcctgaaaaagtattagtataatagaaataataatgattatagtgtgagaattaaaaatgatacataatccttggggtaagagctaaattacagtcaaagggcattgactttatatgtgtggtgtgatcgattcaaatgggaatatcattgacttttacttaaggaaaaaagggcagactttgcaaggggagaaggctgttaaaaataagtcaagttaattaattaactcttcggttttatcacatagtaatagattccattagggagatactgctatttctttttacatatccttattgcataaagaaaaccaccggcattataccggtggttttgatttagaaagcaaagcaagtacaaccaataccccatttagttccatcttttcctattacggtatgagtgtgttgatggagagggttactgcaactatgtaacttgttatcatgggcatcgtgagaaagtatagtgttggctaggttagcaccgccataaccataaacgcccgtcggtgaccagtcaggtgatgctggcggcaattcaggtgataaatttttaaattcatcatttccatacacaacctgtccgcccataattgtgagtaatgattcaaggttcttgatttcttcttctggcacagtaaagtagtcagcagacaatacagcaagatcagcaaactgacctactgcaagggttccttttttaccttcatcaccagagaaccacgcacttccttttgaatataattccagggctacttttctatccagtttatttttttcatcgtatatcgaaagtccaccaatggtttttccggcaaccatccaataaagagcgacccaagggttatagctggaaactctagttgcatcactaccggcgccaacaggtataccaaggtctaacatacgataaatcggaggagtacgctttgcagcttcctttccgtataaatcaacaaagtattcaccttgaaaagccatgcggtcttggatggcaatacctccatttaaagccttaacacgttccatgctacgatctgagattgtttctgcatgatcaaaccaccatcgtagaccattaaaaggaatttcactgttaacttcctcgaatacatttaagaaacgtgtgattgactcatcataagttgcatgtaaacggaagggccaacggttttccaccaatagagaaattactttctttaagtcagcttccatcatcgtagctagttcaggccgtggcatttgaaatttttcaaaatcggctgctgagaatactaacatctctccggcaccattcattttatacttatcagttccttgacctggagaaacaatttttgcccatgaagcaaagtcttcatattcatgatttggattttgcgtaaatagattataagcaatacgcaaagttaattgttccttctcggctaaatgttcaacaactttgtaatcatcaggataattttggaatccaccacctgcgtcaatagcacttgtaatacctaatctatttaattcgcgcataaaatggcgagttgaattaatctggtcgtcaaaattaagtgctggtgctttacccaaacttgaataaagaatagaagcgttaggattcgcaattaaaaggcccgttggattacctcgtttgtcccgctcaattaagcagcctggagggtctggtgtatcttttgtatatcccagtgcatgcagcccagcacgatttacaagtgctctatcgtaaagatgtagcacaaagacaggagtgtcttcagaaacggcattaatttcttccaaagttggcaaccgtctctctttaaattgaaattcagaccaacctccaactacccttacccactgaggagcaggtgtacgccttgcctgttctttgagcatttctagagcaataaaaagtgatggcacgccttcccaacgtaattccatattataatgcagaccaccacgaataacgtgtatatgagagtcattcaggcctggaatagctctctttcttttaaggtctattttttttgttttttccgtggcactattaagaagctcatctccacctactgcagtgactaaaccatcagttatggcgatagcagatacctcaggctgagaagggtcaagggtagtaatttttccgttatataagatcatatccggtaaattcatgttcacacctcgtctactttctattattttgtaaccatggatgaaataatttaccgaaaatcggcatgactacccatgatagcaaggacactatacatactgaaacaaaaaaggccgacataataggattcatatgttttataataggtcctatcactttaggaactaacatgctaagaggccatacacccaaaagggtaacgatagacattttccattttggcggtggaactggcgttttcggagtaacaaaccaataagccaaactactttcagttttgtaactcggattagtaacttgaaattgttctgccgtttttaacaaatcccggcgaatgtctgattcttgccaagcacgtagatgctcatacgtatcaaagcgaaaaataacagtatactctctcgattcgttatttgggactattagatttacacctaaatgccctgggaatttagtagcggcagcttcgatttcatgtctccatgtttcaaactgtttttctttaccttgttgaatttcccatgtaacaatcgttgttactggatcagcagcatccatcgtgttccctgtataagtctcttcgacagctactccttcttgtttcatattttcctgcttggaagcgcgccgtgcaccatagtatatgcgtattctactccttgaccataagcgccagtgtgctcctttacaatttccattacagcatcataagtgtctttgtgtgcccagtcacgttggtattcaagtaaaacttgaattgctgtcactggaattgcaccagcttgttctacacgacgcatagcagcgttatgtgctgtcagactagtaccacctgaagcatcatcaactgcatacacttcatagccagctttcattgcttcaagcacagggaatgcaaggcaaacttcagtccaaagtgctgcaaatattaatttctttctacctgttgctttaactgcttcaacaaattttggatcttcccaagagttcattgaactgcgttctataatttcatggtttgggaatatgtcaagaatttgtggccaaaaataaccagaaaagctgcgtgtctcaactgtagtaagaatagtaggtacgttaaaagtttttgctgatttagcaagcaacataacgttattaatcaatgtttgtctatcaatacttgcaactccaaaagtcatttggggttgaaaatcaatcaaaattaatgcactgttctccggatttaacaattctaacttactcataataaaacgctccttttttaattgtttatcgaaaataatatattttctgtcaattaaaacactgctatactttttaatgtaaaatttagtgctgatttaatcagcactaaatttatactatctactttaaaaagtgatttaaagctatttccttggaatacacttatacattttgcttactaagatctcgttgagctcccctatagcttccaattatattttgatagcctggaagattgctagcaagcaaattgccaaaaccttcgacatcgttgcgccaatcgcgttgtaattcgcaagctacgctaaaccagttcataagttgtacgccattatgtgccatacgcgtattggcagcatctgcaacttgtttactgaaagttcctgaagcatcagtaacagcaaatacttcatatccagcttttatagcggaaagtgctgggaaagcaacacaaacgtccgtaactacgcccgcgatgataagttgtttttttccagtttcttcgattgcttttacaaaatcatcattatcccatgcgttaatttgtccaggtcgagctatttttggtgcatgaggaaagagatcaaccaattcttgcattaaaggtccattaggcccgttttcgaaacttgttgttaaaataactggtaaatcaaaaaacttagcagtatgagcaagggctaaaacattgttcttgaattcatcaacaccatagtcacgtactagtccggacataagaccagtttgatgatctactaaaagcacgagagcatcatctttgttaatacgagaatagagatcagtcattatgtattcctcctaaaaattaagtaatcaaagaaagtttaaatagtcgaatactatcataagtttcttcgtttataactaagctgaccaataatattggttatagcagcattcacggaacatgaagcgctatacaaatttatagtatttgaaaactgattcgttaatcaattctaaattatctatagtttgtataggtggtaactatagttattttcactataaaatgaattggttttacctatacattctatagatagaacgatattgatagtcacctacttttgttattacaattgaataggagaaatgttcagcaaatacttcgtgatgaaaaaagtatgagatggggaagcgttccataaacagaaaatgaattcatcggaacaatagagtttcatacttagcgttcacaatataaatgtgcataaataggttatgagattcatccggattattgaagaaaaggatatatattaaaggaggtaggaaaatggcaaaaattactgtaggaaccgaaaatcaagcaccaattgagatatattatgaggatcatggcataggaaaaccagttgtactcattcatggttggccgttaagtggtcaatcttgggaatatcaagttcccgctcttgttgaggctggatacagagttataacatatgatcgtcgaggttttggaaaatcatctcagccgtgggaagggtatgaatatgatacctttacttctgatttacatcaattattagaacatttagagcttcaaaatgtcacacttgttggtttttctatgggtggaggcgaagtagcccggtatattagtacgtatggaacagatcgtattgaaaaggctgtttttgctggagcagttcctccatatttatacaaatcagaggatcatcctgaaggggcattagatgatgcaacaattgaagcgttcaaaagtggtgtgattaatgaccgccttgcatttcttgatgaatttactaagggatttttcgcagctggtaatcgaacagatttagttagtgagccattccgtttatataattgggatattgcagccagtgcatcacctaaaggaacacttgattgtattaccgcctttagtaagacagattttagaaaagacttggagaagtttaatatacctactcttattattcacggtgattctgatgcaactgtaccatttgaatatagtgggaaattaacacatgaagcaattcctaattctaaagtaacgttaataaagggtggtccacatgggctaaatgcaacgcatgccaaagaatttaatgaagcactcctattatttttaaatgactgattacaactatataattgttaattgataaattataaacaagtaaaaaataaagctttataaaagatgctcttggataaatccaggagcatctttttaaatggtgatattgagatgttaggttgataaatctccattaattttggattgaatactcttcttaacagctaaaatatattgattagagttttttagatttcttagaagtattgttatattactatcaagataatattttgaataattctcaaaacaaagaaatatacattttttgaggaagaaatatcttgtcagaaaacaatgaaatcttattaatttttataattggtagaatttttgtggaaataattctcttaatatattaaaataacatcgtattatgtcagattttaattaggggagagaaattttatgttgaaaaaaatcattccagttgctttagcattaagtacagttacttttactagtgtatttgctatgccttcagcccaagcaagtacagaatcaaaccgctacatagatgtacaaatgctcggtattaacgattttcatgggcaactagacactgtaaaaaaaattaacaataaagatgcagggggaattgagtacttaggggcttatttacgtgatcgtgaaaaacaaaatccgaatacattaaaggtacatgctggagatgttgttggagcaagtactcctgtttcagcattattacaagacgaacctacgattgaatttctaaatgatttgaaattcgatgttggaacgatagggaatcatgaatttgatgaaggtgttgaagaaatgaaccgccttatttatggtggataccatgagaaaacagggaattttaaaggagcaaaattcccatatgttgctgcaaatttctataataaatccaccggtcgtttatttttaccaccattcactataaaaaaggtacaaggagttcctgttggatttatcggagtcgtaacaacggatgttcctaaccttgttatgcctactatgctaaagaatgtagaaattacagatgaagttgaagctattaacaaatccgtaaagcaattaaaaaaactaggcgttaaatctatcgttgttcttgcacataacggaggtataacagatgggaacggcgtaacaaatggtgatatcgtccgattagcaaatgagactgatccagaagtcgatgttatttttggtggccatagccacacttatgtaaatggaactgttaataataaacttgtcgtacaagcaaattcatatggtatggcttttgctgatgttgatgtaaagattgatcgtaaaacacaagatattgttgagaaaaaagcagaaattgttacaacttatcatgaaggcatagagcctgataaaaaaataaagaagaagatggagaaatatcaagcaaaaatcgcacctcttgttaatgaagttgtaggtaagtctattgcgccactagatcgcaaactcaatacggctggtgaatctactcttggaaatttagttgctgatgcccagcgtacaacaatgcaatcccaaattgcacttatgaatcctggtggtattcgtaatgacttagatgctggtgatattacatggggagagatatatggtattcaaccattcggaaatcaattaataaaagtaaatttaacaggtcaagacattcgtgatattttaaatcaacaatggcaaaaagacataacaagaatgcttcaaatttcagggatccaatacacttgggatgcgaacaagcccaatggagaaaaagtaacaagtattcgcttaacaaatggagaagaaatcattccttctaaaacttacagcgtcgttgctaacgcatttttagcttcaggtggagatggatttgtatcttttaaaaacggtaaagatgctgaaacaggaccaactgattttgaagcattagtagattatataaaaaaatcaaaagaaccaattcagtctgttattgatggaagaattcaaaaaataaattaggtttttgttaatcttaaaaacaaatagattacctgtgcactatactttttcgtgtgcaggtaatctatttgtttgcgttttcgggcacagacgctacttcaatcctatcaatatagaaacaatttcgaatgtaaggaatttgtaaggaaaaagagattttcaattatatgtacatttatttaataaagtagcgtatctcattgaagatagtttgttaaaacgctcattgttacaagttacttacatgattaaatataaaccagtattaaacaaagaagtacaaaaagaattcccagagttgtatactcaatacattaagcagacaaataaaaaatctatgttgttagaaattgatgaagctaaagaaaaaggggagggaaagggttcccataaaaatactagaagaaattaggttacttatgcataaatagcataagtaggcacatgttatttataaatatattggaagtgcaattatcaatatttaaagatacgaaagtaatacaaatgaaattcttatttctactactacaagtactattgagcaaatgaagtatgaaattgcttttgaactaggagtaacactgtgacttgatacatcatcatctacaaatggttcggatcggtggagagattacaaaacgcttagttcgaatggttgaaaaacagttaacaggtcaatacagattacactaagaaaataatccgtatatatacggattatttttcctttaatttacaaaaaaataaaatttgaaatcgaaaaaactcctcagattcctttgtaataaacttttttagtcatgttaatggaataggtatcgaaaggtgttaaattagatatggaagatatatgagcccttaaaagggttttggtgttattcgcaattttaattccataattacttaagccgatataataaaatgttctatgtctaaatcgatataaaataataatcattaagtgatatttcttttttatagaataagtaaaaactgatattgtagtaattactgttttgaggtcaatttactgtgcaccttaattattgaagtttttttgttgattaacaactattgtatttggaaattaataataagtttatcccgctatttgccgggcagtaagacctccacctcaaaattcagccgaagccaaagaagttaggtgggggggcgggctgcccgtaaaagcccgattggtgagagctaataatcagtgggggatgaacaaaacccccactgattaaagtttcactttatgtgatgcggtaataaaactatctagtttgctattcttagtatttgtaaagtctatatatttttcctcttttgtggaaagtaaaactattgttacgaccagtaatatagtgtcatgtttttgaatattccattcgttttttatttttagttgatgaaaagacctttctctcaattaaatatttaattgagtacttgaatttcctccaccttgtacttttcaaagcatagtgcttcaaaaatagccgtatcgctttcatctgtttccaatttcacaacttctttattatctttttctaaaatttggagcaaaatagtttttcagtttcacatttaaattagcagtatttattttttgaattcaatttgtataaatgattgaattggaactttgactgttgtttcttgcggtggtacagtatctcctgttactttcgctttattttaaatctttttccagcttggtcctcgcattgactaccactgtattttgaagtacttcactgttttctcaagttcaataattatattttgtagaattaagaaaagaacttagtgtatttcctttacgtatctactctgatatttagatgctaactacaattaaataatatatgatttttataaaaaagatatagtaatattttgttgtgaattgtactaatttgatattttatagtattatttgtcgtgaattatatataacaaaatatattttatggatctataaaggagaatgtaatgaatacttctatcgatatacaacacttgtgtgatcttgcacataaagcatttaatgcccctgtacatattttatctgcagacagaaaaattttatatcattctacatctgataatgtttgtagtcctttttattcttcaaaagaagaacatcttagtgatatttatcaagaaaacgatccctgtaacttgccactttttcgaagcaacaactatcttgaaaattttgttctaattcatatagaaaatcatgatgatattaaagggactattataatcggtcctactatacattcaaaagattcagatgatatgatcataaaatttcagaaagaatttaaatcaaatgataacattcaagaaagacttgcctattatcagtgtttatcggagattaaaaaaactacattaattgatatgggaattttattacattacatgattttcaatgaaaagttagatgtagatattgtcttggaaaaaaataaagtactagaggaaactcctaataaaaatgtgaaacctgatttatatattttaaaacgtcgacaaaacaaacctaaaacgcacaatatggcattagtaaatgatttcttttcgactatcaaagaaggaaataaaaaaaagttaatacagtatatgtatgcggtttcgcaagaagatgttgaacttatgctagtagaggatccgctcaggaatcaaaaaaaccttggaattattgcgattaccttagccactcgatatgcaatagaaggaaatctgccaccagatattgcttttgcccatagtattttatatatacaaaccctagaacaattagataatgtagaatctgtaaagcgattatcaggggacgctttacgtacctttgcagatcgtgtgaaagaatacaatgcaaaaaagtattcttacgcggttactacatgtataaaacatattaataaaaatgtttacgatggaatatctctgaatgaacttgctaatcatttagaaattacgcctacttatctgtctaaactatttaaaaaagaaatgggaattactttaagtgaatatattcaaagggaacgagtggaagaagcaaagaaattattaacactcactacttattcgttatcagatatctgtgcttggcttaactttaatgaccaaagttattttataagagttttcaaaaaaatcactagcatgactcctaggcagtaccgtgaaaaatatacaataatataagtttgttatctactgtctccaatgtaaagacttaaacatgggtgtaagtatcccaaaagatgaaaatactgaacttattacgctagaaagagtttgtgatttgtctagaaaaagaacttgtattcaaatagacgtatgagattaaccagatattatcttgttagcggaacagtttcaatttttaggagttagaaaaataatggagaaacaaagtatatctatttttttaataacaatcatgtgctgaatttatcccgctatttgccgggcagtaagacctccatctaaaaattcagcgaaagcaaagaagttaggtggggggggtgggctgcccgtaaaagcccgattggtgtgggctaataatcagtggggatgaacaaaacccccactgattaaagttgcactttatcggtatagttctaaatcagataaactagtctgacgtcagctcaaacaaatagctcttgaagactttataaacacatatgtgagcaaaagctcaatggaaatctttgtaccatattgttaatttgaaaaaatacattaaccgttattttgctaaaggaaataaaaagacagaaggctgcaaagtgttccatggaagctttgcagcttttttgtaatttaaaacctatgtttataacgatgacaagtttatagactaatatcttcatactagatatttgttaataatgatattagaatgttatgtaaaaaaatcaataatataacatatattactaaatatatctacatgttatgcaattatgcataactaaataaaggtaaaaaagtataaaaagacctattatattattctataagtattttttctaaaataaaatttcttggttgagctaaaatagttatttttaaccgtatacacattaatttgtaatcattccaattacagaaatgaaatttacgaataactatatttatataatttttttcgggacatatttttatttaacagtgaattatcgagcttaatcgacaaaatttttctatttacgcattaaaaatttaatgttttaatgaacaacataactggtatgaccagacagaaaggagaaggttacgctaataggaattatagtgaagttataagtaacattatgtctttaataattttctaaatagtcaatttatttataagaggtcaagaatcaaattggtaataaacgtgttctaagtttctgcataacaaaagtgaagttattccgcaataaaagtataagcaatgtacagtataatttcatcttttgttgtctagtaaggagtttgctgacaaaactaagagggatattatcaaattgaaattaaacaatgttatgacaggattaactgtaagcattggtttattgatcctcacgattctgtaagttaaaccgcaactttaggaaagaattaataatttactactcataaggtgcctgattcaaatatagttaataaatttttgttatttatattttaaaaaatagagtatcgaaatgagagataaataaaatccttatatcctattagaagtaaaaaacaacgatattaacgtatctgaaagatttctccttcttatccagtttacaaagagagcggtcgtacaagttatatgaattaagttataaaaacaatggtaaaggagtgtacggaatgaaaactaaaataatgacaggatttttaataacatccattgtaactggagcaactattcctatcaatactctcgcaacaccaatcgttcaagcagaaactcaacaagaaaacatggatatttcttcatcattacgaaaattaggtgcgcattctaaattagtccaaacgtatattgatcaatctttaatgagtcctaatgtacagctagaggaagtcccagctttaaataccaatcaattcctaatcaaacaagatatgaaggaatggtcatcggaactctatccacagttaattctattaaattcaaaaagtaaaggatttgtaacaaaatttaatagttattacccgacattaaaatcgtttgtagacaataaagaagatagagaagggttttcggatagacttgaagtacttcaagaaatggctatgacgaatcaagaaaatgcgcaacgacaaatcaatgaattaacagatcttaaattacagcttgataaaaaattaaaagattttgatactaatgtggcaactgcgcaaggcatactaagtacagatggaacaggaaaaatagatcagttaaaaaatgaaatattaaataccaaaaaagcaattcaaaatgatttacagcaaattgcattaataccaggagctttaaatgagcagggatttgctatattcaaagaagtttatagtctttcaaaagaaattattgaaccggctgctcaagcaggggtggcagcgtataacaaaggaaaagaaattaacaactctattctagaagcggagaaaaaagcggcgcaagaagcgacagaacaaggtaaaactgctctagagattgaatcagcaaaaaaagcagctcgtgaagcaattgagaaaagcaaacaaggtgaaatagcagccgcagccgcagcaaaaacacaagagtatgacctgatgaaagccattgataccgaaaagattaagaaaacatttggcgtttttgctgaagtaaataaattaacagcagaacagcgagcatatttagatgatttagagaaacaaaatcaaaaaatatatgatttaacaacgaaattatcaatagctgatttacaaaaatcaatgcttcttcttacacaaaatgatttgcatacgtttgcaaatcaagtagatgtagaacttgatctactaaagcgctataaagaagatttaaatctaataaaaaatagcattacaaaattatctactaatgttgatacaactaacgagcagtctcaaaaagatacattaagacaattaaaaaatgtaataagttaccttgaagaacaagtatataaattttaatattgcgttttttgggaatccataaagattataagcatttagcgaaagaaggagaatagtcatgaaaaaatttccattcaaagtactaactttagctacattagcaactgttataactgctactaccggtaacactattcatgcatttgcacaagaaacgaccgctcaagaacaaaaagtaggcaattatgcattaggccccgaaggactgaagaaagcattagctgaaacagggtctcatattctagtaatggatttatacgcaaaaacaatgattaagcaaccaaatgtaaatttatctaatatcgatttaggctcagaggggggagagttgctcaaaaatattcaccttaatcaagagctgtcacgaatcaatgcgaattactggttagatacagcgaagccacagattcaaaaaactgctcgtaatattgtaaattacgatgaacaatttcaaaattattacgacacattagtagaaactgtacaaaagaaagataaggcaggtctaaaagagggtataaatgatttaattactacaatcaatacaaattcaaaagaagttacagatgtgattaagatgctacaagacttcaaagggaaattatatcaaaattctacagattttaaaaataatgttggtggtccagatgggaaaggtggattaactgcaatattagcaggtcaacaggcaacgattccacaacttcaagctgaaattgagcaacttcgttctactcagaaaaaacattttgatgatgtattagcatggtcaattggtggtggattgggagcagctattttagttattgcagctattggaggagcggtagttattgttgtaactggcggtacagcaacaccggctgttgttggtggactctcggctcttggcgcagctggtatcggtctaggaactgcggctggtgtcacagcatctaagcatatggattcctataatgaaatttctaacaaaatcggagaattaagtatgaaagcagatcgtgctaatcaagcagttctttcgcttactaacgcgaaagaaacattggcatatttataccagactgtagatcaagcgatattgtctctaacaaatattcaaaagcaatggaatacaatgggcgcaaattatacagatttattggataatatcgattctatgcaagaccacaaattctctttaataccagatgatttaaaagcggctaaagaaagttggaatgatattcataaagatgcagaattcatttcaaaagatattgcttttaaacaggagtagaactgaaatttaaaacctaaattggaggaaaatgaaatgataaaaaaaatcccttacaaattactcgctgtatcgacactattaactattacaactgctaatgtagtttcaccagtaacaacttttgcaagtgaaattgaacaaacgaataatggagatacggctctttctgcaaatgaagcgagaatgaaagagaccttgcaaaaggctggattatttgcaaaatctatgaatgcctattcttatatgttaattaagaatcctgatgtgaattttgagggaattaccattaatggatatgtagatttacctggtagaatcgtacaagatcaaaagaatgcaagggcacatgccgttacttgggatacgaaagtaaaaaaacagcttttagatacattgaatggtattgttgaatacgatacaacatttgataattattatgaaacaatgatagaggcgattaatacaggggatggagaaactttaaaagaagggattacagatttacgaggtgaaattcaacaaaatcaaaagtatgcacaacaactaatagaagaattaactaaattaagagactctattggacacgatgttagagcatttggaagtaataaagagctcttgcagtcaattttaaaaaatcaaggtgcagatgttgatgccgatcaaaagcgtctagaagaagtattaggatcagtaaactattataaacaattagaatctgatgggtttaatgtaatgaagggtgctattttgggtctaccaataattggcggtatcatagtgggagtagcaagggataatttaggtaagttagagcctttattagcagaattacgtcagaccgtggattataaagtaaccttaaatcgtgtagttggagttgcttacagtaatattaatgaaatgcacaaggcgcttgatgatgctattaacgctcttacttatatgtccacgcagtggcatgatttagattctcaatattcgggcgttctagggcatattgagaatgcagctcaaaaagccgatcaaaataaatttaaattcttaaaacctaatttaaatgcagcgaaagacagttggaaaacattacgaacagatgctgttacattaaaagaaggaataaaggaattaaaagtggaaactgttactccacaaaaatagggaaatattaattctgttgtaaagtgaactaaaacatagaaagtctatgattacactgttaaacagaaaagtaataattaataaatccttatataacagaaaggcggagtctcattaaagacttcgcctttcaattatatataagtatgattcgaataaagaataaccttgtagtttaattgcttttttaaaatttgcaatagaatcggttaatttgaagcagatgatatacattttctttaatacttaatgatttgaaggctgctaaagaaagttcaaacgatactgataaaagatgtagaactcattttgaaagacatcgctttttaataagattagaacttgaaaccataccttatataggaggaatacaaaatgatgaaaaaaatccctcataaactactcgctgtatcagcgtttttaactataacaactacttatgcagtcataccactagaaacttttgcaattgaaattgaacaaacgaacaatgaaaatatgtctctttcagcaaatgaagaacagatgaaaaaagctttgcaagatgctggtttatttgcaaaagctatgaatgaatattcttatttgctaattaataatccagatgtgagttttgaaggaataactattaatggaaatgcagatttacctagtaaaattgtacaagatcaaaagaatgcaagagcacatgctgttacatggaatacacaagtaaaaaaacagctttttgatacattgacaggcattatagaatacgatacaaaatttgaaaattattatgaaacattagtagaggcgatcaatactggaaatggagatactttaaaaaaagggattacagatttacagggaggaattcaacaaaatcaaaagtctgcaaaagcattaatagaagaattaattcaattaaaaaatgctattggagaagatgttagaacatttggaagtcataaagagacattgcaatcgattttaaaaaaccaaggtgctgatgtggaggctgaccaaaagcgtctagaggaccttttaggacaagtaaaatatcagaaagacatagaatctaagggcttagacatggtgaaaatcccctttattccaaccttgattgctggtggcataatgataggtgatgcaagaggtaagttaggttggctagaacctgaattagaaaaattgcgtcagactgtagattataaaataacattgaatcgtgtagttggagttgcatttcataatattagtgatatgcatagtatgcttgatagtgctatcactgctcttacttatatgtctacgcaatgggaggatttagattctcaatattcgggtgtactgggacatattgataaagctgatcaaaaagctgatcaaaataaatataaattcttaacccctagcttgaatgcagcgaaaaacagttggaaaacattaaaaacagatgttgtcactttgcaagaagggataaaaattgcagagaaaaaagaacaggattttttgaatcagcttcgtccatcaaacgtgttctacttttataaaaaaattcataacgcatacacttttgaaataaagactggaacaaatgcgccaaatgcgtcttataaagttatgaatttaactaaaaacactgttcataatatgtggagtggaggggctaatactaacatgtgggctgattggctttcattcaatccaaatgatgaatttgcggtagtagcagtagtggatggtaaagaatatgttgtgtataaagacaaagtacaaaatataatgaactgaatctgaaagtaacgaagtaattggagctggacaataaactagacaacaagttaattgaaaaatctccttatatcctagaatattttgctcaagaaaaagaatttgttcagcgaaaaagtaaatattgaaccaaggagttagttgtcttatgtgtatggttttaccgaaaggtttcaagtacattactcatacaattatgtagttatcctgaagcatctacaggtgttcttatcgaccttgaagaactacttagcttcctaagttgagtaattttatgcaaaattaagtgaacgtttttgtacatagattagttgacatttatatagtttttttccatttttaaagatagttttgttttttatgttatttttcaaaaattactgctgaaatttctatattcatcactcagcatataatcattgtttgatgaaatgacataccacgtcccttagagtttcagacatattacgataaattaaagaaaaaagataatagtagtcaacggttactattatcttttttgaactatttttcattaaaatatctcatctgctgtgccccttatttacttttctagattttatcctagtttaaaatttatgcatttgaactgtttatacaatttgtaggatttttagcttttttgtcgaatacacttaatgcaaggagggacattacatgattattaaagattatttcatcaacctttctattttttctttattagttagcgcagcaatatttattcaagtgtttacaattaattctagtcgatattttgaaaagctctatggagggattattgcagttacgttaatgttcttttcttttccatacatgggattttcctacgatcttcgagttgttcctcttattctatcttttatttactttggtcgtattgctggttggattacgttaattagcataattgtaatgcgtatcttttacacaggagggtactgggaacctcctgtgattgcttatttaggtatggggattctattttctacctttaaaacttattttaaaaaactacatccttttaaaagtgcatcgttatatttttctgtttttattggaataaagtggttagttggcgtattatttaatactacattactttacacaggaggcttattatatatagcgttaggacttttaattgggctatttcttatggaagcctaccagagattgtattatttaacacaggacttatctaaaatgaatcgagaattaaaaaaatcgaagcaagaacttgcagataccgtacatgagcttcaaggaggaatttttaaatttaaaaaagtgggtaagcactttatacacactttatgtgatggacagttttattatcaaaacggattttattctgaacaggtggtaggaaaaagcttacgtactattgatgcttctattgttcctccacatttagttccacaattgatgaagtactatcttcaggcatgggaaggaaaagaaattatatttgaattaccttggccaaatgataaaactattattcttattgcgcttaggccgattaaacgaaatggacaagttattgaagttgttggttctacagttgatataaccgaaaggaaaaaggtagaatcagaattaagcgctactaaagaattattggaatcatttataaagcacaatctagatgctattaccatttctgatcgagaagggcatattttacaagcgaataaagcttatgaaaagatatttgggtggtcatcacaagaaatcataggtaaaagattaccttgtgtaccagattttttaatggaagaatcgcttaaaaatattcagaaaattctaacaggagaatctgtggttactagattagaaaccgttagacaaaggagtgatgggagtcttcttgatgttagtctgacagtttctcctatactagatgtaagaggaaatgtgatagctttatcagcaatatgtagagacatctctgaaagaaaacaagcagaaagagaacgacatcgattacaccagcaattaagagatagtgaaatgaagtaccgtgcactaatcgaacaagcaactgatgcggtatatgtagtagagctgaatgaagaaaatgctccaagtcgatttattgaggtaaaccctgttgggtgtagaaggtttggatatagtagagaagagttgctctcattatcattttcaaatatagtaccacaagattctcaaatgatcgtaaggttattagaaaaaattaaaaagggacaaacttccttcactttgcaagatgaatatctttttccaacaggaaaagtaataacaactgagtttagtgttcgtgtttttaacttaaatgggaaaaaagttttcctaagtatttctcgtgatatcactgaacggctaaaaacagaagaattattacgaaaatctgaaaaacttgctgttgtaggacaattagcgactgtaatggctcatgagattaataatccattaactgcaatgaaagggttcatgcaattactaaaatcaacggaaagtgagaataatcagggttatattaatatagtatcatcagagattgagcgtatagagagcattacaactgaatttatggcggtagccaaaccacaggtggtaaaaatgcaacctaataacattagtgtgctaatggatcaagttttaatgctactacaacctcaagcaatgatgaataatataaaaattaaaatcgatcttaaccctggtattccattgatttcatgtgaaggaaatcaattaaagcaagtatttgttaatatattaaaaaatgcaattgaatctatgccgatgggaggagaaattctcattcaattaaatatacttgataataatcaattaagtattcgttttatcgatcaagggtgtggcattccaaaagaacgtataccatacctcggagaacctttttatagtattaaagaagaggggattggcttagggttaatgatctgttataaaatcattgaaacacatcagggaaatgtatttattgagagtgaagtgaataagggaactacagttgaagtcactctccctatttgtacacttcaaaattaatatattttttcactgaaattttttaagaaaccatataaaacgtaatgctattaaacaaaaactgaatagaactttctatcgttgtttacaagaggaaatgacaaacgcaataagacatggaaaagcgagaaacgatacaagtcttgttacaatagcatacaaatcatgtaatacttccaaaacaagattgtctgtatatgtcgaagagttatatccccgatacacttaatcaattaactatagaaactggtggaatgaaacgaaaatgtaagtatcataggaacttatggttaaatcaaaaaatctctactacggctcttactcaactgtgtagtcattttagaaatcataacagggattttattaagcatggagggaattaatcgacactttaacttagcttctgcagctgtctactgttcaaaaaataatttctgtatgttataccaaaaataaagaatgtacttttagaatttataaaaaatataattaggattaaattaaaaccttccaaaaagcctgttataaaaacatcctttctttacaaccaaaagaaaggatgtttttaatattgtaattatgcttgaaaacatttcaaatttttacttgtaattttaatgaaaaatatagtctcgcaggagattagggagaagagaaactattaacaaagaatttcataaacattaagatgctttgttaatagtttttatacctgtagcggtttgtccggtttgataatattaatcagttcttctttataataaaaccatgaagtacacctcttttaaattactacctcaaaatgcaaagtttttggaaataactattttagatgtgagatgaaaatgggggatagatacttagcatttaataaaaaagataagattacgaaatgtaatcttatctttttattaagaataatgaattgtagcttcaaggtttcagaatgacttttatacagtcgtcttcacgattattaaaaatttgataaccgtagctcgcttcttcaagggggattttgtgtgtaataatctcttttggatcaaattctttatttattattttttcaaatagttccggcataaaatgaatgacaggtgcttgtcccattttaagattaatatttctaacccaaaatgccccgagtggaaatgcattataattgccaccataaacgccggtcatttgaaccgttccatattttcttacggctttcgtagctatttgaatagggccgagagttccgccttgtaatttcaatttttgttccagaaattctaaaggcgatttttttccatccatccccacacaatcaataactacatcggcaccaccatgtgtaatttcctttaaatgttctcccatatcggggaattttgtaaactcaaatacctcaacattgttaatcttttttgcataattcatccgataatctaagtaatccactgcaattacacgtttagcaccttgcatccaagcaaatttttgtgtcattaatccaacaggtccacaaccaaggacgataacagtatcacctggctttacgcctgcgtttattacactccaataggctgtaggtaaaacatctgataaaaatagtagggattcatcttcaagctcgcatgattccggtataacaaatggagtaaaattgccaaatggaacttttaaatattctgcttgtccgcctggatgattaccaaatttctccgtataaccaaagtatccaccagaatcgtaatgaggatttgagttatcacattgactttccatttcatgttggcaatagaaacaatgtccacaagaaacgttgaaggggatgacaacacgatcgccttttttcactttagtgacatctggcccgacttcttcaacgattcccattggttcatggccgataatgtatccttgaggtaagggcatgttaccttgatataaatgtaaatcagaaccgcaaatagcggttgaagtaattcttacaataatatcatcttttttctctaactttgcatcatcaacttgtttaacttgtacttgatttggtccttgataggttacagctttcatctcatatctccttttggattatgtctcaaaacataattttatttaatctcttggtgaaatagaaatctttcttttatttactgaagggaattaggaagtatacatagtgttgttatgaaagtatgttatatcagttattctttcttatatgttttgccctactttaagaaaaaaatcaatttttattcataatctaatttccataaaaaggataattattatttcataatttgtagcatattaaaaacatcggaggtgaaataagatggcaaacaataatagtggaagtcgtaatgaattgttagttcgaggtgctgaacaagctcttgatcaaatgaaatatgaaattgcacaagagtttggtgtacaacttggtgcagatacaacagctcgtgcaaacggatctgttggtggtgaaattacaaaacgtttagtagcaatggctgaacaacaacttggtggtagagctaatcgctaagtgaattagtgtaaaatatagcgaatatgtaaatcaatttcttttgtatatgtataaaaataaaaaaccttatagtaaatggattttcactcaaagattattgataatcttctttcataatctttgagtatttaatttgtaaactactttcctaaacaataaacacgcggtgttggaaaggtgttttccatgcatagtagaaaatcttttgcaggaaaaagcatacttaaaaatttgatttcaatattgaaatcaatatttattatgatattttcgaaaggtaggaatttaaaaatgggtatattaagtggaaatcctcaaaatgaaccgttacattacggtgaagtatttgatatttggagctatcttcttgctgcacagggtgcaattgcaagtcatcaagtatttatgaatcacacaggtgatgaagacttgaagaagtttttagaaggcttaattgaaaatgatatgaattcggaaatagaagaattaaaagctcttttaaagattaatggggtcgctttaccgcctgctcctccagaacgaccagttgcatctatcgaagacattcctccgggagcacgtattaatgatgttgaaattgctgctgctgtttctgcaggattagcagctggacttgtgacatgtagtcaggtgatgggaaaatgtcttcgagaagatgtagggatgctatttggccaatttcatatgaaaaaagcgcaggcaggtgtaacgttgctacgtttaagtaagaaaaaaggatgggtagttccacctccattacatgtaagaaattccgatcaagcttaataaacaaaaataaaaagtggcgttggccacttttttattttttagatgtatcctcaagattggatttatttactgtggaagaatccatatattcctctgacatctccatagcatatttatcatggtgaatatgattgcgattttttaattcatcgtcgttacgtagcactagcctcttcatataaatatggaagaaaacttctgttccaccaataattaaagcggctataaatgaagaaagtccaatgttacgagtagcatctaaattagtaaacaaggatgttagtaaccaagttccgaaaaagcttaagccgaaatctgccattgtagcaatcatatttccgtatttaggtaaaatgaagaggtctccgattaaataggcagctcccgtaagaaaaagagaaattaataatactctaggaattgaaatgccttgaaagatactgagcatgattagcaatactgcagttatcgctgtgtatttaattaataaggcaacaatatgtttcatcattttcctccattgtttaaacgtatatggaatacaatatttcattaaaaacggattatgcttttatatagcgtaacccgttttaatcaccccttaatggtaagaagtacaacctgggtaagaagcaggcttatactatggatagtatttgcggaatatcgagctttattcataaagggtagttccattcttataatagagatgttgcctaagtacagtgttttttcatattaaacttaatattcgttggtgttttgattttgcattatattttgattcattaatatgaaaataaacaaagtatttccgcatttaatgcatctttttatctatatattttccgtaatcaggtacagcaattttatcaaattcttgaaccagtgttttgaggttcgttgatagcaattcacctgacattggtatcccatgtccagtaatagcgactagaggctttaattcttctaatttaatgactgattctttagcggctttccagtctgttgttaaataacgaggaggaccgcttatttcctgttcttgagttattactttatacagatactcctgtttcactgtaacaaaagcgtccccagcaattaaagttcggtctttctctcggaataatgaaatatgcccaggagtatgccctggtgtatgaatccatctaaactctggcatatggggaacagttccatcgataggtagtgcttttacgctatttcctaaatcaatcggttcattagggaacaggggagacattttcgctaccataccaccttcaactgttggatctggttcaggatagctttgttgtccagtcaaaaacggtatctccatttgatgggcatagactggaacatcccaatatttaatgagttcaattattcctccaacatgatcaaaatgcccatgagttaaaataattgcttttggacggctatttgtaccaaatcgctcctcagtaacagagataatttcatttgcacatttaggcattccagcgtcaactaaaacaaaatcatcggtatgcggattcccaacaaaacatatgttgacgatttgaatcgtgtagcaaaataaatcaggtaatacttcgatgccgtgaccactttcaattgaagttgctggaataaacttgtaatcacttccataattcatttccttgttcaccttttgtcccccttaatatgtttcaatacgacattatagttccctaatttctcaaatccattttgggggatttgagaaaagaattagtggggattacaaaaaacaaaaattaaggtggagacatatcgatttatataaagtgcaaacagaaaatattgatttcacaagtgtagtttttactattttttgaggaggggttatgagttaataaaaggttcatctgaatattttaacgtaggtttataaagaatacagaacagtttctaatagaaattcattaaatgaggcgattacttgtaccgatgcttttcataatcaaaggatatttaagttttgtgatgtaattgagattgattaaattatgcttttcaatagctattaacagcccgttcagtgatactaatatctcttactatctataatgatatattctattttttatctaactaacgctcttagtgtagctggtgtccttgcattgagtacttcatggtttttattcattttcacatgtttcatccgaaagaaaaacggaaatcccttctttattagagataggaaattccggttcatcttttttataaacagttcaattgtatttcaaattcacatgatgattcggtaaatcaccttggataaagtaggctttattgatagcgaatctgtatttcttgattgattaccgcctattcctcatacatcattttcctcgtcattccaccgtctacgacaaggtttatacctgtaacaaaatcattttcgctggctgttaaatacagacaggctcgtgcaatatcatctggtgttcctacacgctttgataggtgctgttcatgatcaattttacttaattttgaataatctcctgtttcaatccaacctggggaaatagcattcacggtaatcctagcttcgctaaatgaggctgcgagcgcgtgtgtaatagcaacgatcccaccttttgtggcagcataagattctgaatttggctcagacataatcgcccttgtagaggcaatattcacgatagatccaccttctttgttatgacgcatatactttgctgcttcacgtgaacccaagaaaacgcttcttaggtttgtgcttattacatcgtcccattcttctagcgaaatatcgtaaggagacttgaataactcttttcctgcattattaattaaaatatctatctgaccgtatgtttgattagctacttccattaatcgaataatatctgtttccagccttacatctgtttgtacgaaaagtgcttctttaccctgttctttcatcttagtaactgtttttgcacctgctttttcgtctatatctgctaaaataacattggcccctctgcataatgtaaagcaattcctctcccgattccatttccagcccctgttatgatcactaatttattagaaaaatccattgtaattacactccttttaaaaaaatataacgtctttattttttaatataacatacaaaaattatccttctgcataagcaatagttaattgattatgcccgtatttttattcttcactaataaaaggagtaattatctttttttcataagaagataacacaatattcgttgatggcgtaccatattgcattgaatcatcaataaattgttctaaactttctacagaatgtgttgctattttgacaatatagctaatttctcctgctactctgtaacactcaagtacatctggatgattgtagcaaaagttagataatgatttacaatttgttgatttaaacagtataagtgcagaaattggacgatttattttttttagagaaacatgtgcatggtaaccttcaataatttgttgttcctctaactttcgtactcgctcagttactgacggggaagataagtgaaccgcttccgctaaatccttcattgaaatttttgcatttgactgtaatagtcccacgatttttttatcaatttgatccataaattatccaacctttttttataaaatagaataacttaaattctttataaaataaagaaaaacaatcaaatatccttattgaacttatttatcagccttctatacttgtataaaataagggtagaaggaggcggtttacgatatgaaaaagattttattattattagctgacgggtttgaagcagtagaagctagtgtatttacagatgtactaggctggaataaatgggagggagatggatcaaccgaggtcgtaacagttggtcttcggaataaattaacttgtacttggaatttcactgtcataccggaaaaaacggttgatgatattcaattagatgaatttgatgcactagctattccaggaggatttgaagaggctggtttttatcgggatgcatacagtagagaattcttacatgttattcaacatttttatgccaagcagaagcctattgccagtatttgtgttgcatcattaacgcttggaaaaagtggaattcttgtaggtaaaaaagctaccacatacagtcatccgacgagtaaacgaaaagagcagttaaagaatttcggtgcaatagtacaaaatgatttaatagtacaagatggaaatattattacatcatcaaatccaggcacagcttttgatgttgcgtttttattacttgaaaaattaacatctaaaaagaatgctgaacatgtaaaggatcttatgggattttaggcatttatcttcttatgagtttttgatgcttgctagaagtaatgtgaaaagtcgccgtgctgtagttctatttgctgaacccgaggaaaaagaaaaagggtttgattattacaatacttataataggagaatttttatgattataacacttttcacatatattttgttaggtttatctttagcaatacccgcaggtgctatgacagtccaaatgactaaacaaggaatgagaaatggtttcgtacatggttggtttgtaggtataggaggaatgactgtagatttatctttaatcgtcctgatttatctagggttctctagtgtattaaccaatccatgggtagaaacagttatgtggctcctaggttttatatttttaatgtttattggaatagaaagcattaaagaagcaaagtcggaagttaacatagatggagaagatcctaataaatctttattatcagcttatttatctggttttatgattgctatatcaccggctaatattgtattttggataggggtctttggcccggttctagtttcttcattaggtaatgcaagtacatctacatttatattaatagctgtaggtattttattaggtatctttatgcatgatatgatcttattaagctttgttcattttactagacgttttctaaatccaacctttattaaaagagtatctatatttgccgcaatagtcctattcggatttagtggttattttggttacgagtttataaaacaagtaatgacttttatctcaaaagcatagttcttataaacttaaatagggtggttataaggtaaatgaaaaagatacgtattttaaacgtaacataattgtaaatatgttatatcacgtaggcaacccctcaggaattcattgatccctgaggggtctttaaattctttacacgtagcctctactataattgatggtgtatgagcttagctcaatagcgatggggtactacccgcattttaacgaaaatatacgctaagcaaatttcgatataaaagaagccgaattttctactttaagaaactttcggtttcaattcgttatgacattgctctatgttgttatagatatataatttaattaaagtttcaattagtttagatcatcaaaaataatgtcttttttatctaaatttcttagaacttatatatgagatgaatattaatttataagcattaaatatttgtgaagatttaattgacgaacatattttttgacttttattgaaagtggattacactataaaaattttagagaatggctatctatataaaaattacataacagtagctaatataaatccattaaataagacgattacttgtacggatgcttttcataatcaaagaatgtttaagtttggagatgtaattgaagtggattagagggggagaaataaaaatagttatctcttcctaacttaattatatcatgtaaatcaagttcgaaatagactgtttattcgtattgactcctgctacaatcaagaacacatgcatagtaaggagagatgttatatgagttctttcgttctcgattttcaggaaatagaaaacacgcagctttcgctcgtcggtggaaaaggtttgaatttaggggagttaacaaacattcaaggtatacaagtacccgaaggtttttgtgttacaacggtaggatatgaaaaggctatcgagcaaaatgaagagcttcaggctttgttgcagcaactaacaaagttgaaaatggaagagcgagctcaaattggtgaaatgagtaagaagattagagaagtaattatggcagtagaaatcccttctgatgtagtggaagcagtaactcattatctctcacgttttggaaatgaacatgcgtatgccgtgcgttctagtgcgacggctgaagatttaccgtatgcttcatttgcaggtcaacaagatacgtatttaaatattatcggagaagaagcgattttacagcatgtaagaaagtgctgggggtctttatttacagagcgagcagttacgtaccgcatgcaaaatggttttgaacataatcaagtttctatatgtgttgtcgttcaaaaaatggttttccctgaggcttcgggtattttatttacggctgatccgattacttcaaataggaaggtgttgtcaatcgatgccagctttggacttggcgaggcgctagtatctggattagtttctgccgataattataaggtaaaagaagatgaaatcgtcgaaaaggtcatcgcaatgaaaaaattagccatctatggacgaaaagaaggcggaacagagagaaagaaaattgctcctaatcagcaaaaagttcaaacacttactgaacaacagattttacaactagtacgcatcggaagacaaatcgaagcttattttggttgtccgcaagatattgaatggtgcttagttgatgatacaatttatatagtccaaagtcgccccattacgactttatatccaattcctgaagaaaatgatgagggaaatcatgtgtatatatcggttggccatcaacaaatgatgaccgatgcgatgaaaccattaggtttatcttttttcctgttaacgactagtgcccctatgcgtaaagcgggaggcaggttatttgtcgatgctacgcaacaattagctttacctgctagcagagattacttaataaacactttaggaaaatcggatctactcgtaagagatgcattaacgactatagttaagcgagataattttattaaattattaccagatgatgaaaaagggaagagtgttggtaaaagtgtgccacctgcaaattctcaaccggaaattgaaaatgatccggcaatcgttacaaatttaatacagaatagtcaagcatcacttgaagagttaaaacaaaatatgcaactgaaatcaggagtggacgtacttgattttattttggaagatattcagcaattaaagaaagtattgtttaacccgcaaagtatcgctgtcattatggctggtatgaatgcttcaacatggataaatgaaaagatggagcaatggttaggtgaaaaaaatgcagcagacacgctttctcaatccgtacaaaataatattacatctgaaatgggtttagcattaatggatgtcgctgatgtgattcggccgtacaaagaagttattacgtatttacaacatgtagaagatgatagctttttaaatgaactagttcagtttaagggtggagaagaagctcgagatgctattctaacttttctaaataaatacggaatgagatgtagcggagaaatagatattacgaaaacgcgctggagtgaaaagccaactacaattatcccgatgattttaaataatataagagattttgaatatggtgcgagtaagcggaaatttgaagaaggactgcaagaagctttgaaaaaagaagaagagttagtagatcgattacagcacttatcggatggaaaacaaaaagtagaagaaacgaagcgaatgattcgtaatatccgtaattttatcggctatcgtgaatatccaaaatacggtatgattaatcgttatttcatatataagcaagcgttactgaaagaagctgagcaacttgtgcagagcggtgtcattcgtgaagtggatgatatatactatttaacttttgaagaacttcacgaagtagtctgcacgaataaactagattacgaactgatacaaaaacaaaaaaatgattacaaattatatgaaaaactaacgcctcctcgtataatgacgtctgatggagaaatcattacaggtaaatataaacgagaaaacctcccagatgatgcgattgtaggtttgcctgtttcttcaggagtgattgaggggagagctcgcgttattttaaacatggaagaagcgaatttagaagagggcgatatattagttacagcttttactgatccgggctggacaccattgtttgtgtctataaaagggttagtcactgaagttggcggacttatgacgcacggagcagtaattgcacgtgaatatggattaccggcagtcgttggagtagagaatgctacgaaattaataaaagacggacaacgaattcgggtacatggaacagaagggtatattgaagtgttgtaatgaaataaaagaacatccgctattatagtggatgttcttttattatatagctgacttatttctttaagccagccgcataaaaaggtccatgaactgcgattgttgataaaaagcgagcaatctcctcaggtgtttctttttgtccattatttaaccattgttggatgacacctatatgcgcagatgccatataagaagttaagtattcgcttggaacaagtaaattctccttattaatgagaggaccattcgtatcttcaaataatgttttccacataaagtctttcagttttgtttggaaagataaatctcctttcggacttagtacagctctcataaaatcactattttcatttagaaatgcaagaatagaagtgataagtataaatggcattgttggagaaggatttgatccaaggtcagcaataacttctgggaatttctgtttagcaatgttagaaaactcgtacataatgtcttcttggcattttgtcattaaatcaaatttatcttgatagtgcgcatagaaagtaccgcgattaatgtttgctttcgttgtaatatctttcactgtaatggcgtcaaaacctttttcttcaattagctccaccaatgcatttcgtatggcagtttttgtacgaacaacacgcaaatctaaattattatcgcgcaaagcatatccctccttaattttactcaacacatttagaaaatgtgtcttataaccaacacattcacgatttttgattattgtataaggttcaactcgaacatataattcaaaatataaataaacaacacgttgttggttattatagatcaaattaagggaggagaaaagaaaatgtttaaaaataaacttttattgttatcaccagttattgcactacttgttgtttttattttttcattaacgttatttccaactgttcaaccaaagccgaaaaacttgccaattgcaattgtaaatgaggatcaaggtgtagaaattccaaatcaaccgaaaatgaatatggggcaaacgatcgttgataacatgaaaaaaacagcgaaatcagaggaagaacccgcagtgaagtgggtagaagtaaaaaataaagaagccgttcaaaagggattaaacaataaagagtattacgcggcattagtcatcccgaaagaatttagcgcaaaacaagcgtcgttacgaacaccacagccatcttcacctgagatagaaatatatattaatcaaggaatgaatacggctgcatcaactatggcaggacaaatattacaggcgattgttgataatatgaacaatactgttcgcgcgcaagtattagaaggatataaggaaaaaggaggtacattaacaacagatcaagctgcgaaattagtaacacctattgtaaagaacgtgaaaaatatgaatgaggtcggcaaaaatagtgcgaacggtaactcaccaatatcattgttccagccgttatggattgcaagtttagctagtgcagcgattatttttattgcgattagtaaaatgccagtaagctcaagaaaagaaaactttctgttaaaagtaaaccaaatcgtaacaggagctattgcgacacttgtaattggatttggtcttacatggattgcggatgggatggtagggttaaatatttcgaacttcacggatacagctctattcttatccattacttcttttagtttcttcttaatgatatctgcggtactttcattggttgggctaaaaggaatcggtttattcgctttattactattcttcggggcgccgttactatcgttagcacctgagatgttgtctccgttttatcaagactgggtttactcatggttaccaatgaaatttatgattgaaggcttaagagaaatcttcttcttcggaaaaggattaagctggaatacacctgttactgtactcgtttggattggtatagtaagtatggttactatattagcaactgcattcaaacgtagtgcagtaaaagggtataaaacagaattgaacgcttaaaaaaaagccgtttcactaattgaagtgcaccccaattgttagacacagtctaacaattggaggtgcattttttataaataccctatagaatagacttttttcaagtgtctattctatagggtacattttagtgaaagcctcttcctttttagcattttaatttgttttttgttctttaatagacttcactaatttcatcatttccgctcgtatatcttctctttttacatttaatttttcggcaatttgtttaatgtccattccatcttttttcatttttaatacatcatcaagaggggtattgcttttttgagagatgattgttaacacagtaagatgacgcaatttgatgttatattctttcattttttgctttagctgatcaggtgtggatttttgcatagttgctaactgttgtagcagtgcttgctttgtttctttattcatatgatgctttttcagcttacttggatctacaccgaaatgctcggctgttttctcccaagatttattttgcttatagtaagctaaaacatcttttatttctttattactaattcttgcaatatgagcagctttccaaatttcatgtttgttatagccgagtttttctagcgattgcatttcttcttctggaattggtttatggtgatgcattgttacttcttttggtgtggcagcggatgtagggaaggtggatatcccgcataataatgctgccatagtcatacaaacagcgatttttttgtacatgtaaactcctcctagatggataatgtagaaaactgtacatatatcatttccataaaatgtgaaatacttgtgaacaaatcaagtttttttattcacagtatgaaatgacgtttttagaagttttccaacataaaacattgattaatagtaaaaaactaaggtataatcgaaattgaaaatcaatatcaatgatgacgataaacttatacatatagataaaaataagggagagataaatatgactacatatacttccatcgctaatgtgattaaagaaagacgctctgttcgtacatttacagacaaagcagtagaaaaagatttattaattgaactattaaacgatgcaacatgggcaccaaatcataagcaccgtgaaccatggaattgtaaactatacatcggagaaggccgcaagaaattagtagatgcagtattaaactcttttacggaagaagaaagagcgaaacgcggtaaaattttatcagatcgttttttaagcacgcctgcacaaatcgttgtatatataaatgaagatccgcgtcaaattcaacgtgatgaagattatgctgcaacatgtgcattcatgcaaaacttccaacttcttgcttgggaacgcggattaggttgcgtttggaaatcaggcggattaaactacaatccattatttatagaaggaatcggtttaacaagaggccaacgtatcgttggaattcttcatatcggctatttcgataaagcgccagaaggaaaagcacgtactccgattacggagaagatggagattattgaaggttaatagatgagacattctcgtttttgcgggggtgtctttttattatgcaatcaatcctcatgaaagcttgttcttcatcatacactttcttaagggaaagtgtaaggagggaaaataatgagagcaagtgacgataaagcactgcaatatgcgattgcggaaattacggaaattgcgactggatttgggcttgatttttatccgatgcgttatgaaatatgtccagcggaaattatttatacatttggtgcatatgggatgccgacaaggttttcacattggagttttggaaaacaatttttcagaatgaaattacaatacgatttaggacttagtaaaatatacgaactcgttattaactctgatccatgttacgcctttttattagatacgaactctttaattcaaaacaaattaattgtagcgcacgttttagcacactgtgacttcttcaaaaataatattcgtttttcaaatacgaagcgagatatggtagagagtatggccgcaacagcggaccgtgtgaaagcttatgagcataagtatggaaaagcagaggtagaaacatttttagatgccgtacttgccattcaagagcatattgatccgtcgcttatgcgtccgaagctcgcatggagtattgatgatttagaagaggaagaagtagaaaagaaaaaggtatcgcaatacgatgatttatggaatttagataaccgaaataaaaaacaagagcgctctaatatacgtaaaaagaagaaaatcccaccgcaaccagagaaggatttacttctctttattgaagaatatagccgtgagttagaagattggcagcgtgatatattaacgatgatgcgcgaagaaatgttatatttttggccgcagcttgaaacgaaaatcatgaacgaaggctgggcatcctactggcatcaacgcatacttcgtgaaatggacttaacctctgatgaagcaattgaatttgcgaaactaaatgcaggtgtcgttcagccatcaaaaacaagtattaatccatactacctcggtattaaaatctttgaagatattgaagaacggtacaacaatccgactgaagaaatgaaacgacgaggcgtaaaaccaggatctggccgtgacaaaatctttgaagtacgcgaaatcgaatgggatgtatcgtttttaagaaactacttaaacaaagatctcgtaatgagagaagatatgtacttattccagcgccagggaaaagaatataaagtaatagataaagagtgggaacatgtacgtgatcagctcgtaaatatgcgtacaaatggtggattcccgtatttagtagtagaagatggagactacttaaagaacggagaattgtacattaaacatagttacgaaggaattgagctcgatttaaaatatttagaaaaagtattaccatatcttcatcagctgtggggaagaacggtgcatatggagtcgattgtggagagtaagggtgttgtgttttcttatgatgggaagatggtgcatcggaagtatgtgtgaggggaagaacggacataggatactgtgtccgttctttttatttggaaccaagttaaatatgctattcttgaaaaaagggagttatatagagaaatggagtgatttaaatgagcaaaataggggtatgtaaggttgatattacgccgcctgtaggtattgattttgtcggatatcatagagagacaggaataaataatattgaagagcgtatttatgggacagtttttgtatttgaaaaagatgaaatgaaaactgtgtttataagtatcgataatattgggatgttagtagaagatacgaatatgattcgtgagcgagtagcaagtagccttcatgtgccatttgagcgaataacggttgtttatactcatacgcattccggtccagagacagtcggtgatgatccgctagtgcagtcgtataaaatgattttagtaaataatgtagtacatggtgctgttactgcaaataacaatttaaagcgatgcgaagttggatggggtgttacgacaggtgatatcggtgtaaaccgacgagagagaacatctgatggaaaagcaaagatgggaacaaatatagatggtgttgtcgataaacgaattggcatgttagcaataagagatgctgaaacgaaggagttatctggggttttagtgttttgtactgcgcatccgaatgttttaaaaggtgatagtgatgaattatcaacggattatcctggaatgacgagagagattctagagaagttagtgaactgtcctattattatcgttcaaggtgccgctggaaatgtgaatgcgaaatatcgcggttcaagggaagcgttaaaacaaatggcttacatacttagtggacatgtattaacgatgttaccaacagttacatatagtccaattgtaaaattaaggacagtttcaagtatgatgcaaatgaagttgaaggatattcctgaaattgatgagatacgaagcatggctcgattagccgagaagcagtggggcgtgaatacggatgaatggcttgctatcgtattagagaaatataggcaaggtattcggaagttacgtatagatttagaagttcaactgtttcaagttaatgatggtatgttttcaggtataccgatggaacctttttcagaaactgccttagcaatgaaagagagccttcaaaatgaattggctttctttggtggatatatgaacggatatcttggttatttaccgacaaaagacgaatatgcatatggcggatatgaagtagaattaagtcctattgtgtatggaacagttacaaatttgttaatgccaccgggagagaatactgcggagttgattgtgaaaaaggttatggatttatgtaatagggtgaaactttaatgagacagatttttgaacgcagagtaaagaatatgactcattgtttgattttgttaagtcaatgtaattaataatgataatcattattaattacattgacttctaaaaaaagaaaaactagaatttataaagggatcttcaattgttcgctatcatttgtataggaggtaagttatgttggatagctttatttctataagatgtaggttggctctttatagttttggtgttctttttatctttttttgtacagtatttttggtgaatcagaaggtgtatgcagaagatgtaccgtggacatcagtttcaaatgagggagaacgtgtactttttcaagaacaatctttgtatagtaatgatcgaaggggagaagatcttgtttcaccttcatttgaagggcgtaaacatggtggggaagattggggatacttattaagagacagtaattttaattatccatctaatatccttacacattctgtaataggaagagatgatcgaattagagttactaatacaactttgtatccttatagggctatagtacacttagtaattcaatttaatggacaagaggtttatgggtgtacaggagcgctaattagtaaagatacagtatttacagctgggcactgtgtttacaataaaaagcttggtggatgggcaaaaaatgttattgtgactcctggtagaaatggagaccaagcaccgtatttgccttatagttggacaaagctttattcagtaagtggatggactgatgatggagattcggaatttgattatggagccattaaattaaatggatctcctggagattatacaggttggttaggatatagaactactaatgtagagtctccaaagggattactcgcagtagttccagggtatccatgtgataaagtaggaaatgaaaaatatactatgtggacagattatggaccaattgaaggcactagtcctagaattttaacatataggatggacacttatggatgtcaaagtggagcacctgtatatcatgactattctcgtacgggtgtaacaataatagctacccatacagtaggaagtaattcttggaattctggaaaccgggtgacagacgatgtttttaataatcttaaaaaatggtctgaataaatataataagcttttatggattttattttgtgtattggtcataatcgtaatgactagttatatagtaaataatgaaaagaagtttagtaaggttgttaattctgtaacttttcacgtgaaaaataaagaaaaacagccaataaaagattttgaaattatacttatgaaagacgaatcacctgaacccagtaaagaaattgggatctcaatagggaaaacagacgaagaaggaaaagttatttggaggaatgtgagaaagggaaaatatatcgtatttttgccaaataacgagacgcagatggttatgattaatgatagagatgcaacgaaaaaaataaatatatcattgtagaaaaagagtccattgggattcgttttctcaggttgtggcattaaagaattttacgtggaatggatttaaccttatgtgaagaagctattgattttgaaaatttaaatacaggtgtatttaaattttcaaaacacgtatttatacattggtttaatcgtgcagaaagttatagaactatacgcaaaagaacttggaggtatctaagttcttttttatttgtttcaaatttgtgaaagaaagacatactgattgaaattaaattttttatactctatcatatacccatacaggtataggtttttgtttaatgcatgaggaaattaaataataaataacatggaggtttgaaatatgtctagaaaaattgttgtagtaggcggagttgctggcggggcatcagtagctgcaaggcttcgtcgtttaagtgaggaagatgaaattattatggttgaacgcggtgaatacatttcgttcgcaaactgtggattgccatattatattggcggtgtcattacagaaagacaaaagttattagtacaaactgttgaaaggatgtcaaaacgttttaatttagagatacgtgtattgagtgaagttgtaaagattaataaagaagagaaaacaattacgataaagaatgtaactacagatgaaacatataacgaggaatatgatgttttgattctttcaccaggggcgaaaccaattgttccacctattccgggcattgaagaagcgaaggcgttgtttacgttacgaaatgtacctgatacagatcgtataaaagcgtatattgatgagaagaaaccacgtcatgcgacggttattggtggaggatttattggagtggaaatggttgagaatttaagagaacgcgggattgatgttactcttgtagagatggcgaatcaagtaatgccaccaatcgattatgaaatggcagcatacgtacatgaacatatgagaaatcacaatgttgagcttgttttagaagatggtgtagatgcgttagaagaagacggggctattgtacgtttaaaaagtggctcagttataaaaacagatatgattattttagcaattggtgtacaaccagagagtagtttagcgaaagaggcaggattagcattgggagttagaggaacgataaaggtaaatgagaaatttcaaacatctgacccatatgtatatgcaattggtgatgcgattgaagtgaaagattttgttacagaaatagaaacgatgattcctttagcgtggccagctaatcgtcaaggtcgcatgttagcagatattattcatggtcatacggattctttatataaaggtacgatgggaacttctgtggctaaagtttttgatttaacagttgcttcgactggagtgaatgagaaaatattaaaacgactaaatataccctatgaggtagtacatgtacaggcaaattctcatgcgggatattatccgaatgctacgcctgtgctaataaaattaatttttaataaagaaagcggaaaaatttatggagcgcaggcgttagggcgtgatggtgtagataagcgtattgatgttattgcaacggcaatgaaggcaaacttaactgtaatcgatttgccggatttagaattatcatatgccccgccctattcttctgcaaaagacccagtaaacatggtggggtatgcggcaagtaatatagtagatggttttgtggacacagtgcaatggcatgaaatagatcacattgttaaaaatggtggatatcttattgatgttcgagagcctaatgaactaaaacagggaatgattaaagactctattaatattccgttagatgaattacgtgatcgattggatgaagtgccaatggacaaagaaatatatatcacttgccaacttggtatgagagggtatgttgcagcgcgcatgttaatggaaaaaggatataaggtaaagaacttagatggtggctttaaattatacggaacagtagtaccagaacgtgttgtatattaatattttttcatcttccacttcaaaatttggtggaagatgaaagcctatatagtaaggtttcacttcttgttttgtgaacatataagataaatattaaaaataggggtttacaaaataccctatagggtataatatattgtcataggttataaatagtgacataatggtaatgaggtgattatagaatggaatataatcaagatatgaaaaatagattgaaacgtattgaaggtcaagttcgtggtgtacttcgtatgatggaagaaggaaaagattgccgagaggttattacacagttaacggcatctcgttctgcacttgatcgtacaattggacttgttgttgggacaaatttagagcaatgtttgcgtgagcagtttgaaagcggtaatgcttcaaatgaagagttaattaaagaagctgttcaattacttgtaaaaagccgataatctgtcagacataattgttgacagattttcaaaaacattttaatatacccatacaggtatatgtatataagttgtggaggaatcaattatgagtataaaagtggatatgagtttagattgtaaagggttggcttgtccgatgccgattgtgaaaacgaagaaggagatagaaggattagcaccagggcaagtaattgaagttcaggcaacagataaaggatctacggtagatataaaaagttgggcgggtaaagtaggacatcaatatatcgggacgaaacacgaggataatgtattggtgcattatgttaggaaagcaaacgagcatgaagtgaatgaaattgtgaaatatccacatacaattacgaatgcagaattacagtctatattgtctcatggagaagagagcattgtattagatgttcgcgaagcagcggaatttgcttttggtcatattccatccgccatttcagtaccattaggtgaattaaacagcgcagtattagataagacgaagcaaatttatgttatttgccgaactggtaatcgcagtgatatagcttgccaaatgttgaaagagaaaggttattcaaatgtgaaaaatgtcattccaggtatgttagagtggcaagggaatatagagaaataaatttttttgaataaaaatatacctatgggggtaatagagtgagtgttaaaccgttacaagcaaaagatgtggcagagaaagtgttattcggagagttattcattttagatgttcgtaatgaggcggattatgaagattggaaaattgaagggaaacaagtttcttctattaatagaccttactttgacttgttagatggtgtagatcatattgtaagtgaattacctaaagataaagatgttttagtagtatgtgcaaaagaagggtcttctatatttgtggcagagcaattaacagaggctggattagaaaatatttattatttagctggtggcatgaaggcttggagtgaatatgtaaagcctataaaagttggagatttaaaaaatggtggaagtatgtatcagtttaaccgccttggaaaaggctgtttatcttatatggtcgtttcaaatggtgaagcagcagttattgatgcagtaagaacagttgaagcatatgaagaatttgcgaaagagcatggcgttacgattacgaatgtaatggatacacatttacatgcagaccatatttccggaggacgtaagttagcggaaaaggtaggtggtacgtattggttaccaccaaaagatgcagaggaagttgttttctcatacgaaccgcttgttgaaggatctgttattacggtggggggtactaaaattgtaattgacgcattatactcaccagggcatacgattggaagtacgtcattcattgtagatgattcttatttattatcaggcgatattttatttgtagattcaattgggcgtcctgatcttgctggtaaggctgaagattgggtgagtgatttacgtaatactttgtatagccgatataaagagctatctcaaaatttagttgtgttaccggctcattattcaaaaataagtgaaatgaacgaaagtggtatcgttagtgcaaaattaaaagatttatttgagcataatgcaggattaaatattgaggatgagggagagttccgtaaagttgtaacagaaaacttaccacctcagccaaatgcatatgaagaaattcgtcaaacgaatatggggaaaattcatccgagtgtggaagaagagcgtgaaatggagattggcccaaatcgttgtgcagtgcatgagtcattataaaaataacaaattggaggaattgatgatgaatataaaacaagtattagatgcgaaaggtttagcatgtccaatgccgattgtaagaacgaagaaagcgatggatactttgcaaactggagaagtgttagaagtgcatgtaacggataaaggatcagttaaggatattccagcgtgggcaaataaaggtggtcatgaaatcgtaaagcatgtagaagaagctgatgtgctgaaattttggattaagaaggcgtagtaaagaaataattttataaatgtagagggggagttatatgaacacaatattaagtacgcttttcatggtacttgctacatggtttgttatttcgcgctttttaccagtgaaaggtgtgcaaaatatcagcggaaaaaaattaaagaatatagtggaaaaaaaggggaaacaacttatcgatgttcgtacagtaggtgaatatagaggaaatcatatgaaaggatttcagaatatcccgttaaatgagttagctagtagagcaggtcagttagataaaaatatggaagtaatcgttatttgccaaagtggaatgagaagtaagcaagctgcaaagatgttgaaaaaactagggtttcagcaagtaataaacgtttcaggtggtatgaatgctttgtgaggagggactttaaaatgaaagaaatgacagcaaaagaattagaagaaaaattgttacgtaaagaagcagtaaatatcgtggacgtacgtgaagtagaagaagtagccgaagggaaaattccagaagcgtgtaatattccactaggactattagagtttcgtatgcatgagttggataaaaagaaggagtatattatcgtttgtcgttctggcggaagaagtgcacgagcagttcagtttttagagagctacggttttcaagcaattaatatggtaggtggtatgttagcatgggaaggtaaagtcgtatagtacagggatacatgatttgagcctttttataaatgataaaatacccctataggtaatcggagggagaacaacatggaacaacagaagaaaacaacaatcgttttatttagcggagattatgataaagcaatggctgcttatattattgcaaatggtgcagcggcgtatgatcaagaggtaactatttttcatactttttggggattaaatgctttaaggaaagatgagcatgtgaaggtaaagaaaacttttatagaaaaagtgtttggaaaaatgatgccacgcggtgcggataagatgggattatcaaaaatgaattttgcaggtatgggaccaaagatgattaaaggtattatgaaaaaacataatgcgatgcctttaccagatttaatcgatttggcgaaagaacaggggattaaacttgtcgcttgtcaaatgacagtagatttattagggttaaaagaggaagagattatggaaggggtagagtttgcaggagtaggagcttatttagcagatgcttcggatgggaatgtaaacttattcatttaattcatcttctttctagaagggaggggatgtaagatgagcttagtcgtattactttttataattggatttataggatcgtttatatcaggaatggttggaattggcggtgcgattattaattatccgatgatcttatacattccggtattgctaggattttctggctatacatcacatgaagtgagcggtattacagcggtacaagtattctttgcaacttttgcaggcgcttgggcataccggaaaagtaatgacatgaataaaacgttagttatgtatatgggagctagtatattaataggaagcttcatagggagtttcggtgctaacatattagaggaacatacagtcaatgttgtttatgcagcattagctacaattgcagctattatgatgtttgtaccgaaacaaaataatagtggagatgtgaagtataataaatggttagcaagcttgttagcgttcgttgtagggggagcttcaggcattataggagctggaggttcgttccttttagttcccattatgctagttattttaaaattaccactgcgcatgacgatcgcaacatctatcgctattacgtttatttcctcaatagggattactacaggaaaaatggttactgggcaagtagttatcattccagctctaattattgcggttgccagtatatttgctgcgccacttggagcacgagtcgggaagaggctaaatcaaaaagtactgcaatatgtattgtccactttaattgtaggcactgctgttaaaatgtggatcgatatgatatcaaaataaaaggatggtgctgcttacagcccatccttttatttattgcccgtaaacctaacggattatagttttactttatgcccaaataactttcattaagtttttatattcgtcatttgctaatttatatagcattctcgtatgttcaaagacaagtgctggattaaagtttggttctgagaatgcaagagatgttgaaatatcaattgcattttgcttatttaatgtgaattttgcaaagcgataagatgtatttaattcattgatgacatgtaaaatatcatttgttgatgttgcatcaggcacgtgagcaacattgaagcagtatatatccaccgtaggatgttcgttttggaaagcagcgataagttgaatctttgcgccagcttcagtctctaatcctactgaaaaatgaacagagccatcattttcatctatattttcttccatgtatatatcgttagattttaagtagtctttaaaatctgagatgttatgttttactgcagctttcatatgtatgagccccctgataattggaatagattgctactatttattataatttaaaaatattaaaaaagatagttagaaagttctgatttttatatttggaagaataaaaagaagcggttctctacctccatagagaaccgcttctatattattcattgtcattagacgatgtttctgtatcttcactgctatttttgttcttatttttcacttcattgttatttgattcgcgttcacttgaattttcagacttagattcttttgtctttttcgaatcagagtttgagtcagactttgtatatgcaggtagcccaagatgagtacgaagttcatttgtaacattagctaattcttttttatctggattgtagtagtaagttcgaccaccaccagcagatttgctacaagtatcgtcaccttttgccatatagcaatcatcaccttggatttgtaatttctcaatttccgaatccgatccatatttatagaatgaaagcatatcatcaaatgttaagtttgtaacgaattgtccgttaatatcatcaatgatgttgccaacttttgttacagaaccaacacttgttagtttctttaaaatagcttcgataacgagttgttgacgttgtccacgcattgcatcactatcgatgtgtcttgttctagcaagagcaagagcttcttcgccatttaacttttgaacacctttttctaggtgaattgcctctgcattatcattgctatcttgctcagtaaattcaactggtacatcaacttcaacaccgcccaagtcatcgacgatttttataaatgatttaaagttgaattttacaaaataatcgacaggaacattcattaatttttcaactgcatcaatgcttgcttgtggtccaccattttttccgtttttagcagaaccgaatgcatgagcgtgtgtaattttatcttttttcttttctattggaatataagtatatgtgtcacgtgggatacttaatagtttaacagttttgctatctttattaaaagttgcaagtaaaagcgcatctgttcttatagcgtcaccatattcttttcctcggacatcgctttcatcaacacccattattaaaacagagacattgttcgtaataggtttaacagctttatcacgtaaatcagatttatcaccgcgtgctaaatcgtgtgcggcatttcgaacagcagaagatgctttatttactaaaaaccaagtataaccgccgcctattaataaaacgaatagtatagcgcttataataacttttatttttttcttattttttttcgggttactgcgtgtattttcttgcaaagatgggttttgctccatttcctgtactccttcatttggattgaaatacgacactcatatccacttattataatgaaatttagcgaaaaaaaacattacaaatcatttacatttcgtaaaaattcaatttatttataaaaagtcagattttctatatattatttgtcagatgtagaataagtataagggcttttagtagaaatgaaaatatatattatgagaaagtgatagggaagtaagatttgttgaaatatagccaagaagaaatgagtaagcttacttattttttctatataataaggaagaatttgacggataaaggagagagcataatgaatcatacattattccgagcaatcgttgtgaatgaaacggaaaatcatcagtttgtaagtaaagttgttgagagagaagtaagtagtttacctgagggagacgtaatcatacaagttcattattcttcattaaattataaagatgctctttcagctactggtaataaaggtgttacgagaacatatcctcatacgccgggaattgatgctgcaggagaagttgtgagtagtgaagataactcttttaaggtaggagatcaagttattgtaacgggatatgacttaggtatgaatacctctggtggtttcggagaatatattcgcgtgccatcatcttgggtcgtgcctttaccagaaggaatgtcattaaaggaaagtatgatgtatgggacagcaggttttactgcggctttgtcggtatataagcttattggagcaggaatcaagcctaatatgggagatgttttagtaacgggtgctacaggcggcgtagggagtgtagctgttagtatattaagtaagttagggtttaacgtagtaggagcgacaggaaaaatggaagagaaagatatgctactacgtctaggagcgaaaaaagtgattcatcgcgcggaattgaatgatgaatcaagaagaccgatgttaaaagggatatacgccggagttattgatactgtaggtggacgtatgttagaaacagctttaaaaacagtaaagtatggtggttgtgtaacgacatgcggtaatgtggcaggtcaggaactacaaacaacggtatatccgtttattttacggggcataagccttttaggggtagattccgtgcaatgtccagtagatgtgagaagagatgtttggacgcttttagcgaatgaatggggaaataaagagttactgtcttatatagaagaatgtacattagaagaattagagaagaagtttacacttatattgcaaggaaagttaaaaggaagaacagttgttaaaatataatgaaaaaagagacgcttacgttagcgtctctttcttattataatgattgttttaaattgatttttccttgttcacctaaaacaccgtcagcgatatttacagcgtgatcgccaatgcgctctaagttacttaccatatcgacgaagatgatacttgcatcacctgaacagctgcgttcgtttagacgtaatacgtgacgtttacgaagaacacgttccatttggtcgattttgcgttcttttgcaataacagtttgagctagttcagtatcgaagtttgttaaagcttcaactgagtcttgcagtgttgaaattgttaactcaagcatttcgtttaattcagctaatgcttcatctgatagtgaaacacggtttgaaatttggaaatctacaagttctacaaggttttctacatgatcaccgacacgttcaatatctccaacaacacctgctaaaacagaatgtttttcagaatccgtaggtgaaagtggcttttctgatagtaaaactaaatactcggtaatttttttatctaaattgttaatagctccttctaattgagtagccatgtttgcgtgttttttgtcttgtgtatttaaaaattgatttgcttcttttaatccatgtaatgagaactcagccatacggataatctctttttgagcttcagttaaagcgatggctggagattgttcaataaagattggatttaaatgttgtggtttgaagtcaatcgctgcatcttcaccacgaataatttttgttacgatccatgctaacactgcaatgaacgggaattgaatgattgtatttgttacgttaaatgttccgtgtgcaaatgcaatagtcatttctggattcaagtttaatgatgtttggaaatattgaattaaacttgtaaatggtactaataaaattgtaaagataattgtaccgataatattaaagataacgtgaactaatgctgcacgtcttgcggcaatagaagtaccgattgctgctaatacagctgtaattgttgtaccgatgttatcaccgaataatacaggaagagctgcttgtaaatcgattgccccttgaccgaatagttcttgtaaaataccaatagttgcacttgaactttgtacaattaaagtaaagactgtaccaacaacaattcctaaaattggattatcactcatgctaactgttaattcttggaatgattctaaagaacgaagaggtttcatacctgcgctcattaattctaaaccgaagaataacataccaaaaccgaatacaacttgacctacagaatgtacttttttatttttaaagaagaatagtaagattgctccaattgccataactgggagagcatattctccgattttaattccgataataaatgcagtaactgtcgtaccgatgtttgcacccataataacaccgattgcttgtcttaatgtcataaatccggcacttacaagtccgactgttaaagcagttgttcctgaactggattggattaatacagtaactaacatacctgctagtacacccataagtggatttgttgtaaaacgatctagaatatcgcgaagacgatctccagctgcttgttgcagtccatcgcccatgtatttaatcccgaataagaaaatacctaatccaccaatgaactggaagatcatatcttgaacattatattccacgcattccactccttaaatttcatgtacgatgtaattattaactgaaccttgaggcactgtaaacggtttgctagtaaaatttacactaaatttacaaagagaagaaaagtttacaatcccttaaagaaacagctgtgttttattggtttttatcttgtataaatcttaattttgtaaagaaatcacactttttagaataatattgttcagtcgaatattaaggaaagcgtctgcgagttcatcgtatattttttgatgaatgttaaaaaaatatgtaggaaaatgcatgtagttttataacagcaaaacgaggggaaataattcttttaacacgataaaaaagccactgaattatccagcagctttttccgtgtttttatcgccatgcttttgttttcttatgcttgtaatgtaaatgaagagaaaagcaataagtaatagagaggagtaacgatatacagttgcatagtttgtaaaatgagcaataaatccaaatataatcgctccagcgccgattccaaggtcaaatgcggagaagaatgtagccgttgctacgccgcgtcgatgcggtgctacgcggtcaatcatccatgcttgtagtgcaggttggatcgctccaaaaccacttccgtaacatgctgcagcaataattaagctcggaattgtcgtcgtatacgacaataaaataatgcctgtaaaagttataataactcccggaatgatgacgaatgtatggcctttcgcatcatatagctttccagagaatggacgagttacagcgattgctagtgcgttacataaaaagaagagactaatatcagctatgccgacttctgtagcaaatagagtgataaaacttccgattcctccgtacattaatgtaatacataatattaataatgaaggaagtaaagctttacgctcaataaatccatcgagaaaagtactagatgattgttgtggaggctgtttcgatttttggatttgaagtagtttcgttaatattaatgaaacaattgtgcacgataatgcacataaaaaaagaattgtgaagttatatgtttgcataagccatagtccgataagtggaccgagggccattgcaattgttccagaaaggccaaaatatcccatgccttctccgcggcgagctgagggaattaaatcagaaacgacagttccatatgtagtcgttgtaataccgaaaccagctccgtgtaaaatacgaacagcaagcaagagaaagatagttgaggcgaaaaggtaactgcccatagcgagtaaacagatagcagtgccgatcattaaaatgatttttttattgaatttttgcaaggcgttcccagttagcggtctaacaaaaagtgccgcaacggtaaacatgccgacaacaaatccgatattggaacttgtgccaccaatttctttcacataaacaggtaaggttggaattaacatttgaaaccctaaaaacatacataagtttgcaaaaattaaagcaacaaactctttcgtccataacggttctcgttttacgagtattgcttctcccatatattcatcccctatataaagttttctcttttctttcgagtatatgtattggccaatgcaacagtcaaggaaggtgtcttgaaaacggataacaatttttaagatgaaaaactgacaaatttgtgtaaaagctacacaactatgaaaaaaagatgtaaagtatagatgtatagacttgtaggtgttaagaatgatagaaattgttttttctttaaagaaagcggattcaaaagagtagtgaacaagaaggggatatatactttttcactacatatatttgaaaaggtttacaatatgatgaagaaagaggcgtgtacatatgagacgattaggtatttctatttatccagaacattcaacagtagagaaagataaggagtatttaacattagcaagtaaatatggatttacacgtgtgttcacatgtttattatctgtggatggagaaaaagagaaaattatagaagaatttaaagaaacgatctctcatgcgaatgcattagggttccaagtattagttgatattagtccatctgtttttgaacaattaggtatttcgtataatgatttatcattcttccatgaattaggtgcgtacggtattcgtttagatgttggtttctcaggattagaagaatcaattatgacttataatccgtatggtttgaaaattgagattaatatgagcaatggtacgaagtatgtagataacattatgagtcatagaccaaatcgtgaaaatttaattggttgtcataatttttatccgcatcgttattcaggattatcatacgatcatttcattaaatgctcgaaacaatttaaagattacggtatgagaacggcagcttttatttcatcatttgatgcaacatacggaccttggccagtaacagaagggttatgtacattagagcagcatcgtgaattaccgatgacaacacaggcgaagcatttattcgcgactgaattaattgatgatgttattattgcaaacgcatatgcgtcagaagaagaattacaagcactaggtgcattaaataaagagaaacaaacatttgatatagaaatatatgatacaacgacagaactagaaagaattatcgtattagacgaaccacatttttatcgcggagatgtatctgaatatatgattcgttctacacaaagtcgtgtgaaatataaaaaagaagaatttaaacctcataatacgcgcgaaattaagcgtggagatttattaattgataatgaacaatatggccagtataaaggcgaattacaaattgcattaaaagatatggtgaatacaggaaaaacaaatgtagttggtcgaattgtagaagaagagattttcttactagactatttacaagcatgggataaattcggatttacattaaagaaatagagagaatataaaggggaaaaactactgatttcagcagcttttccccctttatatataaagagcgagaggaagagctatgacaaaggtgcatcagcgattaatttctattttagaggaatttttagaagagaaatcgatgttaaatcgagcttttttagcaggccgtttacatgtatcaacgaagacgattcaaaaggatataaaattattaaatgatatattggaagaaaatggagcgaaaatcgaatcgcaaagagggaatgggtacgaattagaaattatacaaaagaagaaatttgaaaacttttgtgtgagtctatttcaaaaacagacggaaaagatcccaacttcttatgaagaaagaatagcgtacattctgcagcgtgttttaatgacagagggatatgtgaagctttcagaattagcggaagagatgtatgtgagcaaatcaacggtcaatttaattatgaaagatgttacagatatatgtggttgctatgaattacaaattgagaagagaccgtattatggtatacgtattgttggagaggaatttaatattcgttcttgtttatcacaatatggtttaccgcgttatgatcatactccgtttcatgagcaatttgagcagacggagacatatttatcgctacctcatatatcactcattcgttcaattatattaaagtatattgaaggcggaacaatatatttatctgatatagaaattgataatttagtcattcatattgcaatcgcattaaagcgttgtcaaagtcaacattatataaaaggaatgcatgcggagcaatcagaacttatactaaagaaagaatatacaattgcgaagcagattttaggagatttagagaaagagttgaaattttcatttccagaagaagaagtattatatgtgacgatgcatttattaagtactgctgttacaacgagagatcgctatgaaaatgtagaagagctattagggaaagatatatatgcatttatgcaacatattctttttaaagtagcggaagaacggaatcttattttttattatgatgaagaattattatttggatttggtattcatttaaaaacgttattaaatcgtttgaagtataagctaaatacgagaaatcctcttttggcagaagtgaaaaagaattatccgtatgcttttgaaattgcggttctcgttggagatatcattggtgaatatacgggtgaatcgatccctgaaagtgaaattggttatattgcaattcacttcggcggagcgatgagccgtttgcaggagcaaaatcaaaagaaaagatgcttattagtttgtgcgactggtcaaggaagtgcacaactattaaaatataaaattttatcacagttccgagataaattagagattgtaggtattacaggctattatcaattgaaagtagaagatctttataaagaaaaaatagattgtattattagtacgattcatataccgagtggtttgcctgttccagttataaaagtgaattcaatatttgatgaaaaagagattaaatcgattggtcagcggttgtttacgcatgtgaatactagtgtgcagccttatattaaggaagatttaatctttttaaatcataatgcttctacgaaagaggatgttattcagtttttatgtgagaaagctgctgagaaacgctatgtaccagaaaacttttatgcttctgttatggaaagagaaaatacgtctccgacagcggttgggaattcagttgcaatcccgcatccgatgcagttattaagtgaggaaacttttctgatgttttgcacacttgaaaaggctgttgattggggagataaaaaagtacaagtaattattttatttagtgtaaagcgcaataataatgaagatttgcaaaggctttatgattttttatatgatattatgtctagtcaaactacgatagagaaacttactcagaccgaggtaattgaagattttcaagaaattttattatcattttgaaaaagtatataaaaacttccgttacataacggaagttttttatgtttaattgtatgcgttttcataataagataaaaatatagaaaacatatagcttgggggaatttaaaatggctgatatgcaaactccatttgcgttaattttacatggtggcaatgcgagaagcgcggcgcttgaagcaattgcttttgcaagacaaggagatttcgggaatgccggtgaaaagatgaaacttgctagtgaggaaatttcagcagcacaccgtattcaaacggatttaattcaagaagaggcaagaggaaatcatgcagaaattagtttactgttagtgcacgcacaagatcatttaatgaatgcaattacagtgaaagaactggctgaagaatttattgctcttcataaacgagtagaagagaaagtgaccgtataagatgtacattttattatgttgtgcagcaggtatgtcaacgagtatggtcgtaagaaaaatgcaagaagaggcaaagaaacaggggaagaattataaaattaaggcggttgattcagaacttgtgaaacttgaaataaaggaagcagatgtcgttttaatcggtccacaagtgaaatatttatttccagctgtagagtttcttgcaaattcatacaatataccagttgcgattatagaccaacgagattatggtatgtgtgatggtttgaaagtgcttaagcaagcagaacaattagttttagcataattatatctttttaaatataaacattataatgttataaagtttatttcattcttttatagtagagagaaagaggagggctattgatgaatgggtttatgagttttatggaacaaaagattatgccaacaacgcaaaagattgcaggacaacgacatttattagcaattcgaaacggggttatttctacattaccgttaacgatcgtcggatcatttttcgttatctttttaaatttaccaattgatgcatatatggaatggattgcaccgtttcgccatattttagatattccattccgatttacagtaggactaatggcattatacgcagcgtttggtgtaggggcttcgctcgcgaacttttatcagctcaatcagttaagtgcagggttattatctgtactcgcctttttactagcatcagttgaaccaattcaaattacgaaagctgtaccaggtgttattgatgcagggagatatatttcagtaggaacattaagtgcaacgtctttattcggcgcaattgttacagcattaattgcagtagaaatttatcattttatgattaagcataatatctcgattaaattaccagatagtgtaccaccagcagtttcaaattcgtttgcagcattaattccaacgttagcagttattcttttattctggggcattcgctacggtttgaaattcgatgtaaatacaacaattacatatttaatcgcaccattaaaatcagtattagtaggaaataatttattcggtggtttattaacagtattcttaatcgtgtttttctggtcattcggtatacatggaccagcgattttaggaccaattattcgtccgatgtgggattcagcaattcttgaaaatatggaagtgttcacggctacaggaaatgcacatcagttaccaaacttatttacagagcaattcattcaatggttcgtatggattggcggatcaggctcaacgttagctttagtaattatgtttatgttctctaaatctaagttcctaaaagagttaggtagattatcattcgtaccaggtttattcaatattaacgaaccaattattttcggtgcaccaattgtaatgaacccaatcttaattattccgttcgttattacaccgttagtgacaacgacagtatcatatttcgcagttgtttcaggtatgattccactcatgatggcgaaactgccatttacgatgttagcaccaattgcagcggtgattagtacggactggacaattatggctggtgtacttgtacttgttaactttgttatctcgttcgttatttactatccattcttcaaaatgtatgagaaacaacaattagcaggagaggagaaaacagaatgctcggagcaattatcatcttaattacattcgtggtcggacagtgtattgcccattattcgaaatgggtacaaagtaaatctttattagtgttactactagtatcagttttatttatcggttgttcaatgggtgcatatgtaatgttaggattgcaatcaccgtacgtaattattgtaccgacaattttatgtgcaacgtgtttatctgcaaaatatagatttacgagcatggcattaatacaacgtatgaaggagatgcaaaagcatggagcgtaaattaggaatttcactttacccagaacattcaacgaaagaaaaagatatggcttatatttccgcagcggcacgacacggtttttcaagaatatttacttgtttgttatctgtgaatcgtccgaaagaagaaattgtagctgaatttaaagagattatcaatcacgcaaaagataacaatatggaagttattttagatgtagctccggctgtgtttgatcagcttggtattagttatagcgatttatcattcttcgcggagttaggcgcagacggtattcgtttagatgtaggcttcgacgggttaactgaagcgaaaatgacgaataatccgtacggtttaaaaattgagttaaatgtaagtaacgatattgcgtacttagaaaatattctttcgcatcaagcgaataaatcagctttaattggttgccataatttttatccgcaaaaattcactggtcttccgtatgattatttcattcgctgtagtgaacgctttaaaaaacacggtattcgtacggcagcctttattacatcacatgctgcaaacatcggtccatgggatattaacgacggattatgtacgttagaagagcatcgtaatttaccaattgaagtacaagcgaagcatttatgggcaacagggctaatcgatgatgtcattatcggaaatgcttatgcgagtgaggaagagttagaaaaactaggaaacttaaatcgctacatgttacagctaaaagtgcactttgtaggcgaagtgactgaagtagaaaagagagccacgctgcaagaattacacgtaagacgcggcgacataacagagtatatgatacgttctacagaagtacgtaaaaagtacaaagattatgacttcccagtgcgtgaaagtgtgctgcaggaaagagggcaagttgtaattggaaacaattcatttggtaagtataaaggtgaactgcaaatcattctgaaagaaatgccgatagatgaacggaaaaatatcgtcggtacaattgcggaagaggagttattcttactagattatgtaggagcttggacgcagtttacttgtgtggaatagagaagagaaggagaggatgctgtggcatcctcttttttatgttgaaatagtagtctatcgtatatagaatgcaaagagatagatttgattttgacgggagcgaaggagatggaagagtatatagatggtttattaagggggatggctcatgaagatacagaggttaggcatcgtgcttatgatgaagcaaaagagctagatgacctattaacgtttccttatttacagcagaaggtaaccaaagcaaaaaaaatagcaatgaagaaagatatgtattatgtaatgacgaaacttgctattaatacgaaagagatcagtattgctgattatcttatagattgtttggaatgtgaacaaaacccgactttgttaagtgaactgcttagtaatatttatacattgccagaagtaagtgatacaaataaaattattccgtatatttaccataaaaacgatagtgttcgtttttgggcagtttcttccttaaagttatgtaaatcattagaagcggagagtgctttactaaagttgctggatactcaagaaaataaagatgagattacaaatatttgttataccttgcttgagattggaacaaatcaatcgattctgccgttaacaaagcttttatatagtaatagtgcctatgttcgttcaactgttattgaggtgttagcaaaaatagggggatcggacttacaaatagtttatattgaagctttacaggatagaaatgtgatggtgaaatatgaagctgttcgagctatttatacgtatggcgacgaaatggcaatgagaccaatttgcgaacgtgtgaataaaattgttgctagaagacgtaaaaatgaagtagagcctacggatgaagcagagattatcattgctcttcgtttcttacataagtttgctaatcatgaagaagttttaaagatatttgataaagtgtacaaaaaacgtggaaacttgtttatgtcggagaggaagtggcttcgagataacattacttactttcaagagaaagaaagaatgtaagaatcataaaaaagagccagcctcaaggatgagactgactcttttttactaactagtttaatactttaactgtaactgttttacgtccccagctacttgatgtacctttatctggcattaaaacgtcgattttattacctttaatagctccaccagtatcaccagcgattgctactccgtaaccttcaacccatacttttgaacctaatggaattacacttggatcaactgcaataagtttcatgtttggattagctgttaagttatgacctaaagctgattttacttggtcgcctgctttataaccattttcaagtggatctgctgtgtaagctgttgctacaacttggaactcacgagaagaagattgtgtgtttttctcagtttcttttgcaacaggttgttgtgtagctggtttttgaactttattagccgcttcacgatcagctgcctcttgagccttagctgctttacgagcttcagctgctgcctcttgagctttagctgcttcacgagcttcagcatctgcctgagctttagcttctgcttgagccttagctgcttcttgagctttagccgctgcttgagcttcagctgcttcctgagctttagctgcttcacgagctttagccgcttcttgagctttagtttctgcttgagcttcagcgtctgcctgagctttagcttctgcttgagccttagctgcttcacgagctttagctgcttcctgagctttaacttctgcttgagcttctgccgcttcacgagctttagttgcttcttgagctttagcttttgcttgagtttcagctacttcctgagctttaactgcttcacgaactttagctgtatcttgaacattagtcgttttttcaactttaactactggttgaactttaactggtgctttacctgttaagtaaggaacatgaacataagctgtttttccgttatattcaaattgaatccaatcattctgtacttggtgtgttgtttcaattacatcatcttttttcaacttaccaagaatctctgagtctgtgtttgctccagcacgtacgtttaatacgtttgctgttacgtagtaagtgtcttttgtatagtcagcgcttatgaaagcttctttaccgctattcaattgaacttttgaccaaccattttctgtatgtaaaacatttactttatatccatctaataattttcctacaacttttgattcagtagttgggttttctcgtacgtttagtacgtcagtcgttacgattgtttctgctttagcagatgttgtgaaaatcccaagaccaaaaaccgctgctgttgctatacccataaattttttcataatagcctccattgcatttgttttcgttgacctcattatagcaaccattattttcttatttgcgaaaaacataaaattacaaagctttcgtaacggggcattaatattctgtaacaattccataaatatcctgatagcgcttccttgttgttttttggcgtatcagggcatatgaaacacaaaatgagtagtatttcaattactgtaacgttaataatattacagtaatatttctaggtgatatctatagcgttacgaaagtagcatattttactgtttgaatggaaaattagttataaaacgataatctttttaggcgtgaaaatatataaatgaggtgaaatttaataaaatatcggtataattgttacaaaatcagtcgaagtatggaaaaaattacgccttgattttcgtctgttacatagtatttttgcaataatagaattagataatagccttagtacctataaataatgaagagtattaggatgatagttgtaacgtgaaacatatataatagaagaaactcaattcagtagataaataaaaaacgtaggagtgtaaactcctacgtttttgtttattcatatcgtaaacattcaattggatccagtttggcagctttgttagctggtagtaaaccgaatataataccgattaacatggagatacctactgcaagaagtccaagttcttttgagacaacgagtggccatccagcaaagattgagacgatccaagcgaagaaaataccgagcatgaatccgatgaaaccaccaagtcctgttaaaatacaagattcgattaagaattgtgttaatactttaccacgtgttgcaccaagtgctttacgaataccaatctcacgtgtacgttctgttacagatacgagcatgatgttcattacaccgataccaccaacaagtaaggagatagcagcaataccaccaaataccattttcatcataccgattgattcgtctagttgtttcgtaaattcacctaagtcttgtgcttcgaatttgtgctcaaatttaggagctttcatttcgtttaagacagaaacggcttgtttttctacacttttacgttctgtcggagaggtcattgttaatcttacagagtcatactcatttactcctgaaatgacaggcgcattttcaagtgatgtataaccttcaggcataggcattccaaagtcgtttttcgtttcgtatacaccaactattttatacggctttccttttatatctgtgtattgatttgattcccaaccactactaaataatttgttgaaagcttcttcatttaatataacagcagggattgcttggtttaattcactgtcatttaattcacgaccgtgaactaattttattttcgaatctgtcataaaggcgcctgttccaccttttaaatcaagatttacatcttttgaaccagcagatgcttttactttcatacttacgtctggatacacatctttaacgcctggtacagtttgcagacggtttagcatatcaggtgtgattttggcactatctgttccgtaatcaggattgttgtagtaaatcgttacttcgttatcttttccttggcctaattcttttttaaactttgcgtttgtaccatcacccattgaaatgatagtaataatggcactaataccgataataatacctaacatcgttaaaatagaacgcattttatgagcaaagatagaggaaagggccatgcgtatattttcactcgtattcaaaattaacctctccaatcttggacgatatttccgtcacgaattacaatttgacgtgctgcagcttccccgatttcacggtcatgggtaatcataatgattgttgagccttgtttatttaattcgtaaaagaggtccataatttgtgtgcttgttttcgtatcaagtgctcccgtcggttcatcggctaaaatgaattttgggttatttacgattgcacgtgcaacagcgacacgctgcttttgtccacctgataattcgttcggtaagtgagtagcgcgatcagctaaaccgacttttgttaaagcagctaatgagcgctcgcgtctttcttttttatcgactccagcgtaaataagaggtagttctacattttgaagcgctgtaagtctcggtaataacatgaagttttggaatacgaatccgatctctttattacgtacgtgtgcaagttctgtttcagtcatgtttgaaatattttgaccggctagttcgtacgtacctgtcgtcggtttatctaagcaaccgataatgttcattaatgttgatttaccagaaccagaaggtcccataatagaagtgaattctccttggttcagtgttacgtcaattccgtgtaatatttgaacggactctgcaccattttggaaggatttcgtgatgccttttaagttaatcactgggcgacaacctccataccatcttttaagtctttttcaggtttagagataatttcctctccttttttcactccagaaacttttgcttcgctatcagtctcgaattcaacagtaactgcttgttctttcgccttaccgtcttttacaacgaagacaacatttttgtcaccttttttcacgatactgcttttcggaacaattgtaccagttgcttcgccagatttacttgttacgtaaacgtggaagccgttttgtaattcgtcactattatctaatgtgacagtgaattgatagttagaaacagttttattttcatccatgctctttaatggtgtagaaccgatttctgttacttttcctgtccaagtcttaccagcgacagtttttgatgaaacagttacttcttgcccaactttcatactagcaagctcatattcagaaagttgaccttttaccttaaattgaccagcgtgacgaagagtaaccccgctcatacctgttttttcgtcagcagttttcacaatatcatcaattacgccatcagcaggacttgttacagaaagagtgtttactttctcttttgctgctttaatcatttcatcagctttttcaacttcaaactttttcatttcaagttgtgattctaattgcccaacttcagcttctgatgcttttaatgcttcagcgggaaggcctgcatttttatctttttgtaatttttgtttcgccgcatcaatttgtttttggaacaacgttacttctttttgtgcgattttcttttgcatttctgcttctgttacaccttgtttcgcagtcggatcattgtatttaaatagaagctgaccctttttcacttcatcgccttttttaacagctaattcatatgttccttttgttggatcaaatgaaatagtttcaattccatttggaataacttcgccaccaaatttttgcgcgttttggatttgtttttcagttactttatatccgctatatgccattgctacttctgaaccgccaccagcaaatgcaaagtatgatccagctgcaattccgattgctactacactagtaattaacaccttatttttctttttcatctatttatcaccttttcgttcgttttagtatctacattaagtatagaagaggtgaagaatctgacaaatcgttttagcttacaataaccttacagttttgtaaggtatgaatatgtaaatgtaaggtagaggttgtcctattgtaagcaaatgaattgactcgttgtttctttcttacaataatattgtatgaaggagaggaggaaggaagatggaagcttattttagtacgcatccattaaaaccgtttattccatactcaaggcaacatgccattatattatttattatgttggtggggatattttttctgtatcaataccaagatttattacgtcaaaatgagtggaatataacggttcgatatgcgattgcatttttatttataggtagtgaaattgggcttcatatgtgggagtggaaagcggggatttttgagctagctacttcattaccgtttgagttatgtacaattagtttgttgttagcgtcgattatgattgtaacgaaaagttaccgtatatatgagattgtattttttacgggaattattggtgcatcacaagccattttaacaccaaatttgcaatatgcttttccgcattttcgtttcattgaatattttatcgcgcatgtattgcttatttgggcaccactctttatgacttgggtggaaggctatagaccgaccttgcaatctattaagcgtacgatgatatttttaaacatattgattccgcttgtttcgtttgtgaattacaaaacaggtggtaattatatgtttttagctcataagccagaaacagcttcattactcgatatgttaggaccgcatccttactatattatttcattagaactcgcagcgcttattgggtgttttattttatatatgccgtttgcgaaaagagaaaggcatgcgcataaagaatcactaggatcatagcttagtgattttttgtctttaaaatatttacaattcagaaaattaagaataaaattagggggtaaattatagagagagaagggtgaaaatggtcaaaaaggtatttttgaatgggatggaagtgacgattcaatttcttatttcgattttggggattattattttaggggctctgccgaaattgttttatggatttaagctggatgtatcaaagtacatacagagtttaaaagaagtgtttgtgaacttaatggatatttccaatttgcaatatgtgagaggtaaatttttatttccgcagctgttcgtccattataaagaaacgattattatttttttagctgctttttttatttcattatttgtagcattttgtattgtttatgtaattatgagtagttcaccgcgtatacaacatcgaattaaatcatttctcatcttcctagaatccattccagatatccttcttattttagtatcacaaattttagttgtatggttttttaaacaaacaggttttttaccttttcaaattgcttcaattggaggcgagtcgattagagggttgccaatattgtgtttgagcatcccgactacgattatgtttgtaaaaatggtcgtgcttcgttttgaaaatgaactagaaaaagattatgtactatttgctaaggcgaaagggctggggcgttttcatattttaaatcgtcatattttacgaaatgtgttgcttagtacattattctttgcgaaaacgaatatcttttttatgttatctaatttatatattatagaatggatttttaatacgggtggtatttttatgtttttgaaatcgtatttcggtattagagttgaggttttcatcgttagtgtgcttcttatatatattccgatttttattttatttaaattgtttcattatctcattccggctgcgatgaaggagagattataatatgtggacgtatataaaacgtgataaaagattttggataagcattgggtttcttctcctattagttcttttgagcatcggaaatacgttatggaatgatggacatattagacaagttacattgcaatatgatgtggatgaaaatccacaagtgccaccgtttccaccttcattacaatttttactcgggacagaccggaaagggtatgacctgttacatttagtcattgaaggcgcgaagtggacgattggtatatctattttaattgcggcacttagaatggtaataggtgtgtttttcggtgtcgtactcggaacgtatataaaaagaggattttcaaaaattgaggctttctttgatagttttacagttattccaacagttatgattgcgtatttttttcttcaatctgcaaatgcatttggaagcggagaggagaccacaaccttttttgaaagggcttcgtttcaagtggtattacttgtactgcttgtaatgccagttattgcactgtatgttgcgaaggaagttcgtaaattgcgaacggaagaatttgttgatgccgcgcgcatattaggcggatcgagaagacgtattgttataaaacatctttttccgcatctctatatgacttttatactcgtatttcttcaacagtttacgcagagtcttactattttactgcacttaggattacttgaagtgttctttggtgggactgttacgtttggtggacctataaaagaggtggaatcttatacgcatgaatggtcaggtttaattggagtatactttagatcattaacagtgcatccatggattcctctagtcccaattacatttttcggactaactattttttcaggaaatatgattgtgaaaagtatagaagaggcaatgttgaaagtaaggttaggaggggagagaaagaggaaagatgtagaagaggaacaatctgctttgcagtcaaaagaagagttatttacttttaaacatacgatgtgaagagaaagaagaagcaagcatggatttcatgcttgcttcttttctttattttgtagaaacttcacctgcagcttctgtttgcggaataaagtatccaattataccaccgattattgctggaatgatccagccaattcctaagttataaaaaggaatggtgtgtacgatattagcgataaaatctggtatcatttccacattatcaagtgcatgaatacagctaataatgaatgctgcgatcatcgctccgatgtagacagaaggtttacgtttcgtatatttatcgataaatgatacgaaaattaaaatgattgtaattgggtacaaaataattaatacaggtagtgtgattttaattaataagcttaatcctaagtttgaaataacgaaactaaagatacaaacgtatagcacaagctttttgtatgaaatatttgttagcactgttgtgaagtaatttgcaaatgcacttacaacaccaattgccgttgttaaacaagcgaagataatggcgatacttaataaaacattaccgcttgtcccaaagaattgatacataacagtagctaatagttgaccaccgttttcgaattgccctaagtttccgtttgaagctccgatataaccgagtaagaaataaacaattgttaagaatagagcagcgatacttccgcaaatgattgtatattttgcgatagatttcttctcttgtataccgttttgacgaattgcatttacaacaattgttgatagtacgagagcgccaattgcatctaacgttaaaaatccttcaagaaatcctttgaaaaacgggatgtctttatagtcaccgataggttctgcaaacgttcctggtgaaagaatcgcttttgttgccataattgcaataattacaagtaaaattggcgttaatattttacctatatgatctactagcttggatggatttaatgataagaagtaaacgactgtaaagaaaatcgcactaaaaactaacatagaataccattgatctgggaaaagtggtgcaatcccaatttcataagatacagatccagttcgtggaataacaaatagtgggccgattgaaagataaataatgatagcgaatactgctgcgaattttggatgaacacggctcgctaaagtgttaaaactaccaccagcaagggcaacagcaacgatagcaagtaaagataaaccgacgtctgtaataataaaccctgtaatggaaacccacatattttctccggaagaaagaccgagaaggggcgggaaaatcatattaccagcaccgaagaaaactgcgaatagtaataaactaatcgaaagtatttgcgctggttttaaagttgtatgcatataaagaaaatcctcctaatgagtgtttttgtcgaaaattcaaataatttgtcgagtaactgttattattttaaaggtctgatgactagaaagcaatagggaattttgaaaatattaaaaaataatgcattaaatcgaataaatatactatttatatgtttaataggaaggatttaacttttaacgtaaaaaaacacatatcgctaggatacgtgtattaaaaatatatttttctatcgcgttcttcttttaaaatttcaaccgcttctcggaaacgttgtgaatgaacgatttcacgttcacgtaagaagcgtagactatcatttatatctggatcatcggataagttaatgagccattgatatgttgctcgtgctttttcttcagctgcaatatcctcgtatagatcggcaattggatcacctttagcctgtatataggttgcagtaaatggaacaccagcagcgttatggtaatgaagagcactgtcatgatcagcgtaatgagggtcaagaccagcagctttcatttgttcaggggtcgcatctttcgtcagcttataaaccatcgtagcaatcatttcaaggtgagcaaattcttctgtaccaatatcagtaagtaggccaatgactttatcaggaattgtataacgttgatttaagtaacgtagtgcagcagctaattctccatctgcaccaccgtattgctcgattaataattttgcaagtgcgggattgcaagttcccactttaactgggtattgtaatttcttttcataaatccacatagtttctctcctttatatttgccatggccaaggacctttgctccattcccaaggggcattagaatagctgtttccaaactgttggagtggtccgtatttttcttccatcttttgttttaatactctccgtttataggaaaagtcattaaattgattaatcgcagcggtgtcatctggatgtgtatctaaataaagagtgagttcaactagtacaaagtccagttcttgaagctccagtaaaagtttatagtattcttctggtagcgattgattcacgacagtagtcaccgcccttttttataaggattttcataatagtcataaaaaacaggccataaagtccctttttgtagtgcttcttttggtgtgaattgtggtaagtttggcggttgaaagcctaaaaataaattaggaggagtagaataatatttttttccaataggaggacagggatcgagaggactatgatagggcacgaatgatctcatatatttattcacgaataaacctccttaagtgttcattactacgtattgtattcagacataataggcatttatgacacatataaaaaagtaataggtacggggggaatgaatgtggagaatgtgaaacaattcattgtattggaagtgaaaaacttaaaggaaactttgtatttttacgaagggattttaggaattaaacctagtttagaaagacctcaattagatgtaacaggggtttggtatgatgctgactcaacgagaattagttttattatgaagcgcagtttgggcgggcgtgagaagagtgttacggactcagttgatgttctaacgttttcaatttctaacatagagaatgtaaagaagaggttagtattttataaaatcgcatacacagaaaacaaaagtgagaagagtattgtggtacaagacccggatggatataaacttcaagtgatagagaaggatgaatagacggaggggatttagtggagagaaattatgaagaaagtgcgttgtttgagcatcaattttggttaaaagtacttactgatcatgcacaatttttactggatgcattagctccgaaggaaaaagaggatataaaaaaagctacttactttgttgaaacatttacgaatttgttaaataaagttcggaatgtgaatctgatggcattttcaaaagaggcagaacaagccgctaaggagattcgggcgtttaaattaaatattatacagaagcagttggaagggaaaattacgattcattttacgccaacttttattaatcatatggtaaacgaagtggaagagtatatagcagttttagagtttttgaagaaaggggaagttccgcctgtttttcatgaattacattatcatctcgtttggttaacggatgcggctggtcacgcaggctctatttctggtggattagatcttgttgaaaaaagattaaaagagaaaagcgaagaatttacgaagcattttgaacaattttacttaaaggcagttgaaatgacagggtatttacgaacggagcttcatcattttccagcattaaagaagtttacgaaagatgtttcacttgaattgaaattattttcgcattttttacatgaagtggaagagctcgagttatcgaatgaagtattaagtgtattatcggctagaatggcagatcatatggcaagagaggaatgttactacttattaaaactagctcaatcgtctggacttgaaatgccgaaatgtaatccgctttaaagaaaaagaggtcaattttatttggcctctttttctgttttattgtctctttttatttttgcttgttcaatgcttgcctgtaatgtctccataatattaatgatgttcggagttggagagattgtttcagttttttcctgttgttcaattttattctcgattaattcggtaagggcttctttatattcatctgtatacatttcttgttcaaaaggatttgtaaggtggtggattaaattaattgctgcggtgagttcttgtttttgtataggataattttcgttacttggtaagttaggtgtatttgttatagcgcgaatttcattagggtagtggatggtttgtaacattagtccatcttcaaagttacggataatagctaaatgttgtttttttctaatagaaatatgaataagcccaagtttatttgtacgttcaagagcttcttttaataataaataggatttttcatgtcctggggtaggtcctataaaataagagcgatcataaagaacagaatcaatttcgttattttggacaaaagatataatacgaatggatcgtggttcatgagcttgttgtaattgagctaattctttttcatccataataatatatttatgaggtgcgtattcataggcttttacaatatcgttatcatcaatttcttcatccgtacaatcgggagcgaactttttatatttaataggtgttaagcattctttatggagacttaaaaattttatgtcgttttcttctacggcactgtatagtttaattcctatatttaatagtccaagtgaaagtgcgcctttccagacggtatgcaaatgaaacatctcccttcgttcaaaaatggttatgtatattatgagatagtaagaaatttcctatacgttttttgtttttacggaagggattggaatataaaatatattgacaagccctctgaaatattttaatgtgagtgtataaaattgtgtataaaggggagtaacttattacaataaagtcgtcattacagggagaaaccctcggctttattggcaacgtttcgttgttagtgagacctttaccagcaatggtaaaggcccctttctgtctttttgaggacccttaccatatttggtagggtccttttcgtatacaaagagaggagatataaaaatgaaaaaacttattagtagattaagagttgtatttcatgttcgccgatttgttccattcctatttgacttttttacttcaaaagaggtttcaataaagaagaaaattttatctgttgcttttttagttgggtatgtagcgatgccgctcgatttaattccagacttcctaccgtttatcggtattttagatgatattggagttgtgttatttattttgaaccgaattgtaaaaatggcgccagttcaattacaagaaaagcataacgtaaacgtaggataggagttaaaaatatggagcaaattattttagatataatcgagtttttaaagcagttttcttattttggagttgtgttagcattaacgtttgaatttattccggcagaagtagtgttgcctatggttgggtattgggtatacgagggagatatgaatttttggttggctgtattagcagggacacttggtggaacgacaggacctttaacgttatatgcactcggttattacggtggtcgtccgctattaataaaatacggaaaatacttctttattaaagaagaacaaattcaaaaagcagatgatttctttgagaaatatggaccagttgtagcatttgttggacgctttgtacctggagtgcgaacgcttatttctgttccatgtggtatggcaaaaatgaacatatggaaatttagtatttatacatttgtagcaatgttcccgttaacgactttgtatgtttattttggaatgaaattaggtccacattgggaaaaagcagcggatgttgttggacaatatatgctaccgatattaggaggcgttattcttattgttgctagtatctttgtctataaatatatgaaaaaaagaaacaaaacggaatctatctagtcatttgaatattttttgaaaatagatgaatagtacaggcaaaagactctgggggacatacacatatagggaatataaaagagagaggggaaacaactatgtcttgtgagtgctcagggtcagcattaacttgttgtccagataaaaattatgtgcaagataaagtgtgtagtccgtggtcaggaactgtagtggcgactgctattacgaatgtactgtacaacaataatattaatcaaaatatgattggaacagggtttgttcgatatgacgtcggaccggctccgatcacacttacagttttagatgcagcaggcgctacaattgatacacaaacattaaacccaggaacaagtatagcttttacgtaccgtcgtttcgtaacaattgaagtaactttacctgctgcaacagctggaacatatcaaggggagttttgtataactacacgttatccactttcataatagaaaaggagagggctaagatgtacaattctaacttatcatgctgttccagtaaaacacttgttcaagatcaggtatgtatagattgggctgctactggtgcggtaactgaaacagtgtatacgaataatattacgcaagatttatatgcatcaggttatgtgaaatatgatgtaggtacagctccaattacggtgaattttttagtaggagcgacagtggtgaatacaattactgtacaaccacaaagcagtggatcatttacagtaagatactttactacaattcaaattgtaacaacaggaacgggagtaagccaaggacaattatgtctgacagtacgttatccaatttcataagcaaaagcataccaagtggtatgcttttttatatagtttgtaagttaaggtggtgaagaaatttataagcaaaatgagaattgacaacaatattttccttccatatatcgggttgggttatttggaatatcaatgatagccacagattgtaaggattgacctgtatatgacattgtgttgccaggatagactgtaaaagtatttgtcacctttccgataatttgaacggtaattcctgcagtactactagtactattatacacagaaatggtaccagatattttaactacaccatctccttcccataagattaatgtaggattttcagaaggtggtggaatttcttttgttataagaaaattaccggcaaattcatttgtaattaattcacagcctggtggttctggtggattaggtggatcatagggagggcagatgatagataaaggggcataacagccgatattttttttacaagccattagtagctcctcccttcatactttctttttattactattaaatgttggaaaacgatagttgtgttaataaaggggcgaaaaatttcaggaaagtttgtttaataggcttccaaatcataataatgaataagagtctgttagacacaaggtacttgtataagataatacaagtaatgttggatgttacagaaaaatgactgtatatttacaaaagttaaataaatttcattttcactttaaacgaagttaatatgtgttcgatacaataaccattgtaattaattcattatatgaggaggatttacgtggacagaactgatttacgaaaagtaaaaggccttattggattattgatggtttttgtattagcattcgtatcatttccatggagcacatcagttaaagcagaagagaaaaagcaagaaaaggcatcaagtgagaagaagatagtttttccagttgtaagtgatgtgcatattaaaaatagtggaacggatgatacgtttcgctggaaaagagcgattgaacagtttaatacattagcaccaaagcaagatgcgtttgttattgtaggtgatttcacagatacaggatcagtgcagcaatatgatcgtttcatgcaagtgtataatgaaaatgcaaataaagatgcagtgcgaatgaattctctcggtaaccatgattattggaacggtttatccgtagagggtgcacagaagcgtttcttagaaaaaacaggtatggaatcaatttattatcataaagtggtaaaaggttatcacttccttgttatgtctccagagaatggaacaacacatggttattattcggacaagcaaattaattggttaaaagaagaaatggcaaaagcacaaaaagatgatccagaaaaaccgatttttgtatttttacatcaacatattaaagatacagtgtacggtagtcaggaatggggaacacaagatagcgcaaaaattaatgcagtgttaaaagaatatccacaagttattacgttttcaggtcattcacattatccgttagatgatccgagatcgatacatcaaaaagactttacatcagttggtacatcttcagtaagttatatggaagttgaaggtggtaaagtacaagggaatatcccgccaggagctagtacgttaagccaaggtttattagtagaagtagatgaagaagaagtgacgattaatcgccgtgatttccatacgaattcttggacaggcgagccttggaaaattaaattaccagcaaagaaagaaacatttacacatgtagaagatcgtgataaagaaaagccttactttgctaaagatgcaaagcttgctgtatcaaatgtaacagaaaatgcggcaacagtaacattcccgcaagcattggacaaccttcttgttcactcttaccgtgtgcaggctagagataagcaaacgggtgaaataaaaaataaattgttagcattctcagagttttatcgtgatccagtgccgaaagatcttacgtttacgcttgcagggttagatggcgggaaagcatatacacttgaagtagttgcgattgattcatttggcaatgaaaccgcacagccgttaactgcggaaattactacgaaaaaagataatattgacccgaatgtgaaagtaccaaaagctgatgttttcgatgtaaactttgcagatggtacatttaaagacaattcaccatttggtacaaaaggtgatgtgaagggcaatgtgactattgaatatgataaagcattgaagaagaatgttatgaagttaaacggaaaagcaaatacatttggataccttccattttcagcagcacaaaaagaaaaagtagcaaatacgtttacgttagaaactgtattttcaatgaatgaaattcgcggacaaggcatcttgcaaaatacagagagcggcggaattggatttgagtctacaggaagtggatatgttgaattatgggctcacattggaggtagctataaacgtgttggagttcaattagaagcgaacaaaacgtatcatttaacaggaacgtataacggaagcgaagtggctatttacgtagatggtaaaaaagtaaatagtcagccagctactgggaaagtgtatcatccgaacgtaccatttgcatttggagcggatcctgatagtaacggaaatggtggtattccgttaaatggacaaatcgcgcttgcgaaattatatagtaaagctttaagttcttcagaagtattagcatcatacaatgagttttctaaccgtacgaagttagagcaagtaaatgcgttatttgaagagcttggaaaagtaaaagaagtgttagttagtacgtatgaatttggtgataagccaggtcaatattcaaaggaagcatttcaagaattagagaaaagctataacattgcaaagcaagcatttgaaaatgtaggaagtactggggaacaaattattcaaacatataacgaattaaaatcagctaatgtaacatttgtacaatcaaaagtggcagaagaacaaccaaaaacaacgaaagaaaaattacaaatcaatattgaatctgcaaaagcagtagtgaagaaagcgcaagctgtaaatgtaacagatggttcagtgaaatcattgcaacaaaaaattacagttgcagaagctgtattacaagatgtgcaagtaaaagatgcacaggtagaaacgatgaatcgtacattagagtatgcgatttcacttgttgaaaaaagtatgaacaaataagagagaagaaaagaagcttatcatgataggcttcttttttgttatactaaaagtagcatagaaagagggagcgaataagttggaacagaaaaagctaaaaagaattcttgaatatgtatggatcgcggttgtgctccttgtaggatattatttattaaaagataaaagtatttgggttttattcttaatgacgtttttattagcaggattaggaacgttatttattaacttcttctttgatagtttgaatgcctggaagaagaaaaagaaggggacgaagtaaaggagggaatatatgcaaaagtggaagctcatatatcaggtgattattttcttagtgcttgtgggtattggaatgatcacatactcgacaccaataggaaattgggcatggtttacagcttgcatcggcatatttttcattttacaatcgttaacgaaaaaatatgatagtatagaaagatagctcgccattttatcggcgagctattttgttatgcctttttctgttcatcatttgttttttcaatagctaaatgactatgctttctagagtagaagaaatagaagcataagccgactataagccaaactgcaaagctaatccatgttgttttagacaaattaatcattaaatataagcagcaaagaatcgcgacaactggtagtacaggtacgaaaggtgtgcggaatccgcgttttaagtcagggtgtgtttttcgtaaaataagtactgcgcagcaaacgaatgtaaaggctgttaacgtgccgatgtttactaaattcgctagcaaatgtaagtctaaaaggcctgctaataaagcagcaacaacgccagtaatccacgtatttaataaagggatttttacttttttatttacacgtgctaacgcttttggaagtagaccgtcacggctcattgcatatgaaacgcgaacttgtccatacataacgactaagaggacggttgtcattccagtcatcgctccaacagcgagtagtcctgcaattgcatcttcaccaacgaagtgcaatgcaaatgcaactggatcagaaacgtctaattgtgtataaggaaccatacctgttaaaacgaaagatacaatcatatataaaatagtacaaataagaagagaaccgataataccaattggtaaatcacgctgtggttttttcgtttcttctgcagcggttgcgattgcatcaaaacctaaaaaggcgaaaaacacagtggcagccccagtaataataccgtcgtatccgaatggaatgaacggtgtccaattttcaggttttacatattttgcacctgctacgataaaggcgataataacggctaacttgataagaaccataatattattaatgcgtgcgctttcgcgtataccaaaacttaaaaggccagtaataagaagtaaaatacagacagcaggtaaatcgatgagaccaccttttcctacgccgggggccgaggcgattatggcgggcaggtgtatattgaaaccttgtagtaatgattgtaaataaccagaccaaccgacagctactgctgcaacggcaagtaaatattcgagcattaaacaccatccgacgatgaaggcgacgacttctccgactgtcatatatgcgtaagtatacacacttcctgagacaggaatagaagaagcaaattcagcataacaaaaggctacacaagcacaagtaaatgcagcaataaggaatgatagcataataccaggaccagaatgttttgctgcaacaatacctgttaatacaaagatccctgtcccaattacggcgccgattcctaaaaacgttaaatcgagtgcagttaatgttctatctagttgctttggtgactcagtactaagcgctttttttcgtaataatgacttcactttggactctctcccccgttttttcatttccataactgcgactatagtatgagcccattaaaaaagagtaagtaagtggaggtgcagttatggtatgtagttttttaaaattgctggattaatcttaatataattcagaatattttgtcaaataaaaatatgacaaataaaatgcggatcaataggggaaactacttgcagaaatggacgtgggttaacgacccactgattaaagttaaagtaggagcagatgctatgttattttattttgaacttgtcgtcattttactttgtacgaaattagctggtgacattagtgtgagacttggtcagccttctgtacttggtaagttaattgtcggtattattatcggtccggctgtactcggtattattaatagttctgaactgattgatgaattgagtgagattggtgttttgttacttatgtttatagcgggacttgaaacggatttagaagagttaaatcggaatttgaaatcgtcatttgcagtagcggctggtggaattatttttcctttcatcggtggttatgtaacaggattgctgtttggattaatacaatcccatgccatttttttaggtttattactttgcgcgacatcggttagtattacggtgcagacgctacgtgatttaggaaaaatgaatacgagagaaagtacaacaattttaggtgctgccgtatttgatgatgtcattgtcgttattttattagcatttgtaatgagttttttaggaacacaagatgtgaatataacacttgtcattgtaaagaaaattattttctttgtaagtattgtttttattgcatggaaagtcgttccttggattatgaaaatgcttgtcccgcttcgtgtaacagaagcgttaattagcgcggctcttattatttgcttctctttttcttattacagtgaaatgatgggaattgcaggtattattggagcgtttgcagcgggaattgctatttctcaaacagagtataagcatgaagtggaacataaaattgaaccgattgcttatgcaatatttgttccagtattcttcgtaagtatcggaatggaaattacatttcaaggtattggaagccagctttggttcattattattatgactctcattgcaattttcacaaagttaatcggatcaggtttaggagcgagactgacaggatttaatctccaatcttctattagtattggcgcggggatggtatcacgtggtgaagtagcgcttatcatcgcagcaaatggacttacggcgaatttattagcgaaagaaaatttcacagcgattgttattgttgttatattgacgacgattattacaccaccacttttgaagaaatattttgcatagagaggaagggcttatctgatgtaggtaagctctttttttattcctaaaagcaacgatcatatagcatgaagcgtttgtaattatggtaaaatctatgtatgtgatatgacaaggagagggaagtgtgaagattacgaaggagaaggttattggtgtaatcgtacttattgcagtatgtataccatttactgcatggaaagaatcaaaagtgaaagattttccggtttctattttttcggaagaagcagatggtgagtacggtcagaagctgaaatatactgcttttttacctgatgttgcgatttggatgaacggttgggaaaagaagtggacagaaggggaaagaactgtttatcaaaaagggaatcgcattgtaaatgtgtttcatcctcctggcgatgatggttattaccttcttgaagcaagagaaaataagtgaacgcaaccgtaagaagtggaggttaaatagtgaaagcttcaacattactatttaaaattgaaagtaatatggatcaattttcaccagctgagaagaaggttgccatgtacataatggagaatgcagagattgtaccgaatttaacgacgaaagaagtgtcaacgaatgcaggcgcaagtgaagcgagtgtcgttcgcttttgtaaatcgattggaatcggaagttttaaagcatttaagatagcactcgttcgtgaattaactattgctgattataatattaacgatttttcagtgatgaatacagaagatggaccgtatgatttatttaataaagttacttatgtgaataaagctgcaattgaggcgagtgttactgcaatagataagagagaacttgagaaagctgcagatcgtattgtaaatgccgataaaattatcttttatggagtaggcggatcagctacgccagcaatggacggggcttataaatttacgcggcttggatttacagcgatgatgctatctgattttcatatgatgttgccacttgtgacgaatttaaaagaaggcgatatatttgttgcgatttcaacatctggtcgaacgaaagatgtgcttgaaatggcgcagtatgcaaagagacaaggtgcaactgttattggaattacgaaactagatcaatcatcccccctatataaagaagcggatattcgcctttgtatgccagatgtagaacaagatcatcgtattgcgagtattgcttcgagaatgacgcaactgaatatgattgatgctttatatgtgattactttcaatcggattggtaataaagtattggatcaatttatggagacgcgagaagaagcgttgcggttacggaagttaaagtagaagaaaagatgaggagactcatctttttttatccccctatttgccgggcagtaagaccctcacttcaaaattcagcggaagcaaagaaagttaggtggggatcaactgcccgtaaatgcccgattggtgcgggctaataatcagtggggatgaacaaaacccacactgattaaagtttcactttatgatctttgacaaaaatatgtcatgtcgtgaaattttatttcataaaataagaaagagtaattgatttttagtttcttaaagttataataaaagtgtgaaatataatttcaaagagggtggcaatatgttagaaaatttatcgacagaacatcgtaatgagaaaacaatgaatttggatgagatgagcataaaaggagtgttgcaaagtatgaatgaagaagatcgaactgttgcgttagcagttgaaaaagagatagaacaaattgaaaaggttgtacagactgttattaaatcttttgaagaagagggacgtttaatttacattggtgctggtacgagtggtcgtttaggtattctagatgcagtggaatgtccgccgacatttggcacggatgataaaatggtgcaaggatttatagcaggtggattgaaagcgtttactaaagcggtggaaggtgccgaagatcgcgaagagttagcagaagaagatttaaaaagtattggattaaatgagaaagatacagtgattggaattgctgcaagtggcagaactccttacgtaattggcggcttgaaatacgcacagagtgtaggagcgagtacagcgagtatttcttgtaataaaaatgctgaaataagtaaatatgcaaagttaaatgtggaagtagagacaggtgcagaaatattaacaggatcaacgcgtttaaaagctggtacagcacaaaaattagtgttgaatatgatttcaacagcttcgatgattggtgtaggaaaagtatataaaaacttaatggtagatgttcaatccacaaatgaaaagttagtagaacgatcaaaacgaattattgtggaagcaacaggcgctagttatgaagtagcggcagagtattatgaaaaggcagaacgtaacgtaaaagctgccattgttatggtgttgttgcagtgcgaatatggggaagcactggagaaactaaaatgcgcaaaagggtttgtgaagaaagcactataaaataatagggagggggattctattatgaagaaagaagagagaatggccaaggaaatttcggagcaacttggaggaataaaaaatattcgtagtattgctcattgtatgacgagactacgattaacgcttcatgatgaaagtaaagtaaatatggaccttttaaaaaaagttgaaggcgttatgggtgttatagaagatgagacgcttcaagttgtcgttggtccaggaacagtaaataaagtagcagctgaaatggaaggcttgacaggactacgaattggtgagatagcagatcatcaccttgaagatattgggcaagagatgaaatcagagattaagaagaaaaataatacaccggtgaaaaactttttacgaaaaataggaagtattttcattccgttaattccaggacttgttgcgtcaggaattataaacggggttgctaactttgcgaaaaacgctggtgctgatccaaatgcaacgtggttacaaatgttactactcattggcggcggtatctttacattcttaggaattttagttggttggaatacagcgaaagagttcggcgggacaccggttcttggggcaattgctggcattttaattttcaacccggcgatggcaaacgtaaaattgtttggtgaagcattagtgcccggacggggcggattattcgcagttatttttgcagcatggcttatggttgtagtggaaagacaagttcgaaaagcagtgccgaatgcagttgatattatcgtgacaccactcattactgtattagttgtaagtattgtaacaatgttagccattcagccattagcaggtttcttatcagatggtattacgagcggaattaatgcgattttaaatattggcggagcatttgctggcgcagtacttgcgggaacatttttacctcttgttatggtcggattgcatcacggtttaacaccaattcatatggaatttattaatcaaacacacgtaacacctttattaccagtactagcaatggctggtgctggccaagtgggcgcagcaattgcgatttatgtgaaaacaaaaaacaaacgacttcgaaatgtaattaaaggtggattgccagttggctttttaggaattggtgagccgctattatacggggttacattaccacttgggaaaccgtttattactgcttgtttaggagcggctgtcggtggtgcattccaagcagttatgcaaacagcttctcttggaattggcgtatcagggctatctttaattccgttaattgctgacaataaatatttactatatttcttaggtttagtaattgcatatgctttcggatttatctttacgtacttcttcggatttaaagaagaaatggcagaaaacatatagagaaagggattcctttctctttttctattaatagagagggagatttatatgatcggagtttccatttatctttcaaaagaacgagtagagaaacaaaaagagtggctaaaagtagcgaaggaacatgggtttacatctatttttacatcactgcacattccagaagatgatccaaatacgtataaagagttaattcaaatattagggaaacaagcttttgcacatgaaatggagctaatggttgatgtttctccaaaatcgttacaccatttagggctaacatatgaaaatgtggaagagctattggactggggtattaccggtttaagaatggattacggcattgcgccaaaagaaattgcaagcgtatctcataagatgaaagtagctttaaatgcgagtacgattacaaagtcattttggaaagaattacttacagaacatataagagtagagaatgtagaagcatggcataatttttacccgcgcccagagacaggactagcaaagtccttcttacaaaaacaaaatcaatatttacagaagtgcggaataaagacaatggcatttattccaggagatgcggaaaaacgtggtccgttatatgaagggttaccaacgttagaaaaacatcgcaatatgcgcccgcttgaagcgtacttagaacttgtacaagattgtggtgttgataaagtattgattggagatataagcgcaagtttagaaagtatgcaagaagtagctagtgcaagtagagggattattccattgcgttacaaatcatttataactgataaagaagtattaaaagtggtagagcaagtgcatacaaatagactagatccgtctcgtgatgttattcgatctgtagaatcaagggaaggaaatagagtggtgataaagccgatgcatacaattgtaagaaagaaagggagcattacaattgataatgaattgtacggtagatatgcaggggagatgcaagttgccacatatgatttacctgtagatgagaaagtgaatgttgttggaatggttgtggaagaggacgtttctttgctgccttatattggcgctggaaaaatgtttcaactttttctatgcgatagaataaaagcttgaattagcgctattttgtaagaaaacattatccgtaaaacggataatgttttttgttttatttaaaaaagtatttgacgaatgaaataaaataccgtattgttttgacttgtaaataaaagttcaccataacaaaacaaaaaggagagttcaaaatgaatcaatatattgggaatttaattattcgtatcgtgttaggagttacgttctttgcacatggtttagcaaagtttcaatcaggtatcgataatgtagcagggtggtttacaagcatcggtttaccaggtggccttgcatacggcgtagcaacagttgaattagttggtggtatattattaattatcggtttaggtgtacgatatgtaggattgttattcgctcttattttagctggagctatcgtaaaggtaaatggagcagcaggtttattaggagatggaaagaatccaggatatgaattagatcttgcattattatcaatgggtgcgtatttattcgtagtaaaagcagaaggatatgtagatcgtttcttaaaagagaaagtaatgaaaacgaagtaaattttatttataaatgttgacttgaagaatcattgtaactataatgattacagctaatagattaagagtaaaacaatttaaatgtttttttacacaagatgtaactgtgatggttacgtctcgtgtaaaaataaataaacgggaggaagtaatatgcctaaatcaaatttagaaattattaaaagcacgtatgaaggatcagcttcttcgaatgcaaagcatttagcagaagccctctctgaaaaagtggaatggacagaggcagaaggttttccgtacggcggaacatataaaggcgtagaagctataatggaaaatgtatttagccgtttaggatcagaatgggatgattataaagcaagtgtaaatacatatcatgaagtaaacggaaaagatgtaattattgctgaaggtatgtattctggagtttataaagaaacaggaaaatcatttgaagcagaatttgttcatgtatggcaacttgagaacggaaaaatcgtgaagtttaagcaatatgtagatagtcatattgttagggaagcgatgaagagataatgctttttaaatggatcgtaggtatatgcattacaattatagtaattttctcgtctatagttggcggaaagaaattgcttgcatatgtggaaaaagaaaataaaaatattcaaaccgagcgagcggcaaacgaaaaagagaaaaaagctgcagaagaagctccgcaaattagtgaaggtgaaattatttctactatgcataaaatggtgcaccaaaaggtaaaatcctctgaaaaatggggatttgtagagatgacaaaaaaggaaatttctaatgtaaaaagagatattgaaaatagtacaggttttcaatataaaatgaagttattttctattataaataggtgggaaaaaggagatttttctcaaactgttgaggagcataactttttatggagccttcaaggtggagatactggcaaggcgacggaacgtttatcgccaaaagaggaaaagcagtatataagagaaatgaagagtaaataaaaacatcgccaacctagatgacgatgttttttcattaagaatgttttcgtattaaaggtctagttggctgaacggcaacagttttgaaatgagaaaataaataacatcctgttacaacgacaattgtccctaaaatttgtatccacgttaattcttctccgagaaatatgaatgctaaaatggctgtgaaaattggattgaagtttagaaaaatacctgatgtagttgcgcctaatttttgtacgccaatattccaaaataccatacaaagaactgtcgaaataagcccagtatataaaagtgatgtgatgaaagaagtatttatatttgaaacagtgaagctacctatgttaaacggtagtaataaaataacgccgaaaataccagagtacaacgttgccataagtggtgtagttgtttttgttgcccatttactacaaacagaatagattccccaaatacaaaccgctgcaatcatccataaatcaccgctattaaaatgtagtgaaaataaaagcgagaaatcaccttttaataggacgaggatgaccccgaagaatgaaagaatcatggataggatttgaagtgtatttactttttcttttagaaataatactgaaaataatgcgattgaaattgcattcaatgtagaaataagacctacattcgtagcggatgttttttctaatgctaaaaattgaaagatgttaaaaagagcgactcctgaaattcccattaatattaacggaagtatcgcggtacgtggtggaaggattttcttttctttaaaccataccattggtaataaacaaacaatcgcaatcagccaccttaaacttgtcagtgtcatcggtgatgcatgatcgacgagtgattttccaacgacgaaatttcctccccataataagctcgttagtaatagtaaaaagacgtaaaaataaggcatgataaaatccccttttttgtaatcaatacttattgtaaataattttagcatttttctttattgtgtaatatattcttttgtataatggtgaaaactcgataaaatatttagtttaaaatgatatttacagaaaaatattcagttttatataaattataagttgttttctcgaataatcatcggtaagaaaaaaggaggaattgtaatggagtcgtctgttattaaagtgttggatgatttggatgtacgaattttagatatattgcagaaggattcacaagtaagtaatgcagagctggcacgtcgcgttaatttatcaccggctgcgatgcatgcaagaataaaaaggttagatggggaaggtttcatcgataagcaagttgcgattttaaatcaagaaaagcttgggtttgatttattatgctttatttttatgagtacgaatattcatcaatttgacaagttagaagtgttggagaaagaattagaatcgatgccggaagtgttagaatgtcactgtttaacaggagagtacgattatttattaaaggttgcaaatcgtgatcgtaaagaactagagcagtttattagaaagctgaataagcttggtattacacgtatacagacgagtttggcacttcgtgaaattaaatattcaacagtattaccgatacgagatgaggaaccgagcatcgattagattgcttggttttttgtttgtataaagtgattgacgaggagaaaagagagctgtattattatataaaattatgaattaaaattcatttaaagttataaatattaatattgaggggcaaggggatgtaatatgaaaatctgtaatgcggtgaccagtgatgtgaaagaaatttatagtcttattgaggtttatgcaaaagagggagttgttttaccacgttctcttttgtctctttatcaatatttgcaatgtttatatgttatgaaagaagacgagagaattgttggagttgctggattgcatgtgttaggagaagatcttgcagaaatacgatcgttagtagtttcgcatacatatgcagggaaagggataggacgtatgctcgtaaatcatgtaatggaggaagctacgaaaataaatgtaagaagagtaatttccttaacatatgaaacagtattttttcaaaagtgtggatttgattttataaataaagaagcgttgccagagaaagtatggattgattgtagacattgtccaaagatggattattgtgatgaagtggcgatggttcggtatgttggataaaaaaatttatagagaaaaagttcccactattatttacagatatagtgggaacatgtatttccataagaaatggacaggttattaagaatttgaattcgtttgtcttacggcaaaattataaagtggatctttaagttcatagttatacgttaaaccgtcgacaattcctacaactttatcattatcataaaggtcgagcataaattttgccatttgttttgcagtgtggaatttcggtacaacattatcgtattcgaactcatcaataccaaatgaacgttttgcaaattctgtttcagttgccccaggtgctaaaacctttgcttgcagttttgcgccttgttctttcagttcgtgagacagcccttctgtaaaggcacttacataaaattttgtagcgcaatacgtaacagcatcagcaacaatcgtgtatccgccgcccgatgaaacgttaataagctgtgttccgtcaaccattgaataatctcgaacgaaaagagaagagagtattgttagtgcttctatattgacatgcaacatcgtctcgattttatttaaattttgttcggcaattgaggcgaaattaccaaaacctgcgttattaatccacgtttcaatttgaaaagcttgtaggctttcataaagtttataaacatcttcagtaacagataaatcagttcgtcgaatgacaacatctaactctggatgcatttcgttaattttcaattttaatccatctaattcttcttgtcttcgagctacaagtactaaatttttcccgcgagatgcaaatgctaaagctgcttcataaccaattccggaacttgcaccagtaataacagtgtatttcatataaaatccccctaaattcaaatttatttatggttagattgtatttgttagagtatactctaagtcaaatgttttttataaatttgatacgttcataaaatatataaggataagcatgtggagggagtttagtatgtatacaattagtgaggtagcaaaattattaggattgagcacacatacactacgttattatgaaaaggaaaatatattgattgcaaatcgtgatacaaatggaaatcgactttacgaagagtcacatataaagtggttgcagtttgtaatgaaattaaaacaaacgcaaatgccaatagcaaaaataagagaatacgctagattatatacagaaggggagcatacaacagaagctcgtttacagctcctagaagatcataggaaatctattcagattcaaagagaaaacttagaggttacagagaagatgcttgagaataaaattcgtacatacaaaagctcattggaaaataaatagatgttgttatgtgatgaaaaatggatttgatctatgagtatttcatcatagtgtgcggataaataaaaaagagcagctagcaaaagctaactgctccattcaagggatctctccaagggggagtggagaaaatattatgttactagcattattgacagattattaggaaatatacaaatcggatgaaagaaattttaaataaaatttcggtattgacagtttttaaaatgttcatgtacaatacatatgaatgacattcagtcattttttatggcaggatgcagttagcttagaaatggaacaaatacaatgataaatgaggatgatagttatttttatatagtattgatgaaagagtatatttttttaaaacaaaatgactgatagtcagtcataagaggtgagaggtatgaaaaatagagcttggttatatgtcatattaacatgtatctttgaaattttttgggtgtttggttttaatacggctaatacttggtggcattggattattattttaggagttatcgctgttgattttcacttcctttctaaagcgtgtgaacatcttgcaacaggaactgtatatgctattttcgctggagctggtacggtaggtactttcttaatggatgtatttcttttcggtggaagtttcagcgcaggcaaactattcttcattcttatggtagtagccggcgttatcggtttaaagttagctgacaataaagaagaaactgtggaaggagctgcttaaaaaatgggttggtttttcgtatgttgtgctgcaattagtgaaatagtcggtgtgataggacttaaaatgtatagtaaagataagacattagccaatggtgcgatttatataggtgggtttgctacatccttcgcatttttgtatacttccttcttatttttacaagtaagtgtcgcctatgcggtttggattggtatcggaacagcaggtgcagttttgttaaacatgttcttgtttggtgagtcgaaaagtaaagcgcgtatcattagtgtgtttcttattgtatgtggagtgacaggattaaaggcactttcttaaagatatattgtatttttatctcctaattgtttattaggagattttattataaaaaaatgatttcctcttagagttcactatcattgacagtacaatcgattatcttataaaatgagtgacagtcattcaatatgcgtgtgaaagggtttagatgatgaataaaaaagagaaaattgtctatgcagctattgaagtgtttcaggaaaagggcgtcgaaaaaacgaagatttctgatatcgtgaaattagctggcattgcgcaaggaactttctatttatattttccttctaagttatctgttatgcctgcaatagcagaagtgatggttgaaaagatgatacttgcagtgaaagaaaaagtgcaaaacgatgcgcctttctcaagtaaagtaacgcaagtaatagatgcggtgtttcactttatagctgaatatcgtgaaatacaggctttaatgtatgctggtcttgcatctacagaacatataaaagaatgggaagctgtgtatgagcccctttatatgtggctaagtgaatttttaaatgaggcaaaagaagctggtgaaattcgtgattcagttcacgcagagcgaacagcgaagttatttatcgctctagttgaatcagcagcggaacaagtgtatttatatgatcataaagatgatgagcaagtcgatttgcaaaaggcagaagtactagattttttaacacatgcactacatataaagaaatagtgagatgaacctgtctgaaaaggtaggttcatttttgaggaaaactgaatgatagtcattcatctaatgcgtatgtatgtgtggaaggatagtgtgaaattctaacgagtaggggggcatctctactcatgaatagcccacaaatagaaggataaagaaaaagcttcttgggcattattttttgagaggaacttacgggaagaggtgttaaaaagtgaagaaaccgataaaagaacaaaagatggtattggtcattcttttgagtaatatatttatcgcttttttagggattggattaatcattccggttatgccgtcctttatgaatgatatgcatttaacagggaagacgatgggatatctcgttgcagtgtttgcaatggcacagctcattacttcacctattacaggccggtgggttgatctttacggtagaaagaaaatgataatcattggattatttatttttggtgtttcagagcttctttttggattaggaaaagatgtatggatgctttatgtagcaagggtattaggcggaattagtgctgcgtttattatgcctggtgttacggcatatgttgcggatattacatctattcaggaacgtccaaaggcgatgggatacttatctgcggctattagtactggattcattatagggcctggaatcggcggatttattgcagaatacggtatacgtgtgccgtttttcgttgcagcagtaattgcttttatagcatgtgtgatttcgatctttattttaaaagaaccgttaacgaaagaagaacttgcagagatttcttctaatacgaaggaatcaagttttattggtgatttaaagaaatcattacatccaatgtatgcaattgcatttattatcgtatttgtactcgcattcggattatcagcgtatgaaacagtgtttagcttgttctctgatcataaatttggcttctcgccgaaagatatcgcagcaattattacaattagttcaatctttggggtagttgtgcaagtatttatgtttggcaaattggtagaaatgttcggtgagaaagtgttaattcaaatatgtttaattgtaggtgcagtattagcattcgtctcaactgtagtctttaattattggattgtacttctcgttacttgcttcattttcttagcatttgatttacttcgtccagctttaacgacatttttatcaaaagcagccggaaaagagcaaggattcgtcgctggtatgaactcgacttatacgagtttaggaaatatcgcaggaccagcgatgggcggaatattatttgatatgaatattcattatccatatgcattttcaggcgttgttttaatagttggtctcggcattacatttatgtggagagagaaacagttggctgaaagttttgcgaagtaataaaaccccttacgacggtaaggggtttttgttttattctgattaaagtttcattttataaacttaacccaaaccgttttaattcaataaaaatcccctctaattgctttcctttatccgttaatgtgtactctacacgaggcggaacttctggatatacttttctcgttataatgccttgagactctaattcttttagtcgaagcgataatgtttttggactaataccatccattgatttttgtaaatcactaaagcgtaatgttccttcgataagaagatcacgaatgattaaaaacgtccattttgtactaattacatcaagcgttttagcgataggacaaggtatgcccggtaaacctttcgttaattcaactggatttatatcgttcatggaactagcctccataaaatttttttggatgaatttgctttatagtatcacaaaactatacttttggtaactatatgaaaaaaatatcactacttccataaaggaagttagtgcatatacaatagcaatacgaaacaaaaaggatttatataaggaggtggtgatttccatggggataaaaaagttatttggatttcttagtttgtttgttatttgtattgtgcttgtagcatgtggtgtggaacaaaaaactgaagttcagttattaaaagaaatgccaaagccaaaagcaatgacaattgatccctcactaagtaaaaaagaagcgacagaaatggttcatgcggcgcagcgtttttatgcattttgggatacaggtaaggaggaacttattccgcagactgttactaaagatttcttcgataatacattgccgaaagggcgaacacaaggcattgaaggattaaagtttgcagcgcaaaattttcgtaaagttgtgcctgatatacattgtgagattgaagacttattagttgttggtgataaagtaacagcccgtctttcttttacaggaacgcataatggtaagaaaattaatttttttgcaattgatattttacatgtgaaagacggaaagataacagaagattggcatttagaagataatcttacactacagcagcaactcggcttaatagctgaagagtagatcatataggggagagaaaaacgatgaaaaatatatttattataaatggacatgaaaaatacggtacaaaggaaggacgattaaataaaacgttagtagattatatggttactgtattagacgagaatcatcatgtgaaaacaacaacgattcaagatggttacaatattaaagaagaacaagataagtttttatgggctgatgttgtgatttatcaaacaccaatttactggtttagtgttccaggcttatttaaaacgtatatggatgaagtatatgaatacggtttgttctttaaaggtgcagatgaatatggaacaggtggtttattaaaagagaaagagtatatgttctctacaacttggaatgcacctgaaaaagcatttggagataagacaaagttctttgaaggagaaagtttagaatcagcgcttagtcatttacatcgcgtgcaaaagtttctcggtatgagtccgttaaagagttttgcttgttatgatgtggtgaagaatccggatatagagaagtttttagtgaacttgaaagatcacttagatggagtaattaaataatagtatgtgaagaaggtactgttaaggatgtagtaccttctccttttataatgactcacattttaagacatggatggctgtatccataacttcgcaaaatttgcccaaccgaatgaatcaattgttacgttttttaaagaagaggggtatgtttttctttttagaacgtgatagttaaataaaatgatgtgttctgcttgtaaaaactcttcaatctcatacatgagttcatagcgcttttctttattttcttctagtaaaaatgtatctagtaaacagttaatttgtttttcgtagtgcgggtccatgaaccgatttacgaagcaacttttatttttaaatacatttaagaatgcaatttcatgattggcagcaaatacttctcccatgaaaataatatcagcatgtttatcaatagagcgattcatataatctgaaacgggaaatgggtgaagctctacttgtatacctaaactttcacatcgttcttttaagaaatatgcgtcatttgcactatctttaaatgcgaagaagtaaatatgtatcgtttctccattatatgtactctttttcaaatactcttttgccttttctaaagagtaggatcttcttgttgcaaggcggcttctatcagggaaaaagcttgatgcagcaattgtccgtctaccctctatgttacgaagtatcatttcaacatcatatagttctctccaagcttttcgaaagtaaatgtcgtgatgaggaccaggttttttaaagttgaagctagcataaatacaacctatttcttctatttgtatatcatgcctttcattttcctcttcgtttggtagttcataatcagcatctatttgcacatggtcaggaataccccaaaattcaatacggtctaataacgcgcgctctttaaaataatgggtgaacgcttcgagtatgatattatcttcagagtaatgagcaagtttgaaaggtccagtacctatataatgatgattttgaatactcgtatcacgcggtaaaattgcgagctgcattgaacttacatagtgtaagaaaaataaatttggtttcgctaaatggaatcgaatttgtagtggtgatggcgtttcaatttgaacgatttcttctgttaaccattcgaaaggagagtaaacttcttttagtctttcaaatgaaaattgtacatctttagaagttaaaactgtttcgttatgaaaatatacatcctttcgtaaataaaaagtccacgtaagcccgtcttcacttaattcccacgtatgcgcaatgtgaggctccattttttcagtaacatcgttatagacgactaatgtatcaaaaatttgactcgtaagatggctctctgtagttacagccacaaaagccggatctaatgggaatatctttctcgatataggaatctttaatacgtcgtacatatcatttgaaggttcgtatccaaaatgatgatgtagtttattttctatctttttttgaagtgcgagggggaggggttcttttaaaagaagaaagatatcttttaatttttcttgcgctaacagttcatctgtataggactcaatcgcttctacgaaattatgtataaatagaatttccgttttatttccgcggcctcgccctggagtccagctaattaattgctcctcgctcattttctttaataaaatctttacgtttttcgtactgcaatataaaacatccgctaattcttgtaagctatttcgcatatgttgttgatcttgtgcatgtagtcttagtctaatgtaatagtccataattttcatatatacacttccttctatcataaaaggggaaactctttagaatattctaacctttttcttcctttttttcaaagtaaaataagtaagcataaggaggggaaacaatgggattttggagtatgcatcgaaatataaaaattagaattataacatcgtttttaacacgtactgtgtccacgatgatttttccatttatggcgatttatttttccataaagttaggtagtgcgattgctggtgcgttactacttattaatgtcatagcttcattagtaattggtttatacggtggatatgttggagaccggcttgggcgtaaaaaggttatgattatcggtcaaagtatacaagtcatttccattgcttgtatgggagttgcgaattcggattacgttgactcaccgtggttaacatttatctttatgctagtgaatagtttagggtctggacttatgaatcctgcgacagaggcgatgttaattgatgtgagtacacctgaaaatcgaaaagtgatgtacagcattaattactgggctattaacttatccattgcaattggagcgatatttggtggattactatttgaaaactatagattacaattgtttatcgtattaactcttgttgcgattattactctatatgtaatggcagtatatatggaagaggtgtatgtggctagaaaaacagtagagaagaaaaatgtattaaaagatatggcggatagttataaagttgtaatgaaagatagagcttttttaattttttgtgcagcaagtatatgtacattgtctttagagtttcaaattaataattatttaggtgttcgcttgcagaaggaatttgaaacggtgcactttttattcgggaatggttttacgtttgatttaacagggattcgcatgttgagctggatttctgcagagaatacaattttagttgtgttatgttcagcacttcttattaaaatgctgaaaagcttcaacgatttgaaaatcttatatgtaggcttatttatttacacgattggatttgcaatactcggaacgagcaatagcttatggattttattaattgcagggcttttccaaacggtaggcgagatgatgtatgtgccagtgcgtcaatctattatggcagatatggtgccaaatgaggcgagaggttcatatatggcgattaacggaatggtctttcaagttgcaaaaatgaacggggcattaggtgttatgctaggttcatttattgcatcttggggcatgagtgctctgtactttatcgttggtatgagcagtattttactatttatgaaggcgatagggagagagaagtatgagggggaggtttctcagattggataaaacgatatgaaaagcgatgctagaaatcgcttttcatatggcttttaaaacggatcaacttcagctaaatcaggattgctatttgggtttgttaataagactttcagctcacctacttcagagagcgcaacgaggatataaccactaataaggacgacgagtccgatgacccttaatgtttgcagtgtaatatcacggctattgttttcggagttgtcttggggcgttgaaggtggattgttattcataaatagggctcccatcttttgtatttatatatgtgcgaaatcattatttaacttatggataggaattatatagtcattttcactatatgagaaatgcctatgaaaagtgataaggaatttttgggcgagaaaaggggggaatccaaaagattattaaaactgaacttttggattcccctctttttatttatcttgctatttgtggtggtcggatttcctgtaaacgaccagttgatgagggctaatgaatcagtgggggatgaataaaaccccactgattcattattttcatgtaaatacaaggttagttaaccaaattagttatcctaatatacgcaacgattcttcaataaacgctgggatgtcctctggctgtctacttgttactagctgattttgacatacgacaacctctttgtcatgaaagttcccgccggcatttttcaaatcgacttcaatagatttatatccagttacatcgcgtccttcaagtgtttgtgcagtaatgagtagctgaggtccgtgacaaatagcaaaaacaggtttttccgcatccataaatgctttactaaagcgaacaaaacgttcatcggcacgaagtatatctggagaaaatccacccggtatgaagagggcatcaaagttctctggagaaacatcatcaatacttttatcaatcacgacttcactttttccttgcttaccgtgtaccgttttccctttttccatttcaatagttgtgaattcatatcccttttgtttaaaagcttctactggctctgtgtattctgtatcctcgaaataatccgttattaaaatagcaatttttttactcattctaatccgctccttatattatattatcggctccagaatcttccttgggcaatgccttctataaatgattcaattgaagtatttgttaagttgtaaactcctgctccatccagtttaatcttactatggtccaaagcatgaggattactaaggacatgagctatcggtttaaaatgtttaaaagtagtttctgcaaattctaaaacagggggttgaatgacagactcactactaaacactaatactgcatcaaaaagggaggagtctgttgttgtataagtgtcagttactttaatggaatcattgaactgataaattttattatctatgatactatagttaatttggtgttgtacaaaagcttgaatccattcggacagaagtgagacgcttgggtcaccatttaatagaattgcaacatttttggaatcagatttaaaaatagtattggacatacttagtgcaggtgattttgcatctgaatttacttcgtgattttccttaggtaaaggagctccaataatgttagcgacttcttgtgctaattgacgatcgacgtggtttaagagagcaattacatttgccttcaccatgtctgatttacacttcccaacttcaaagcaaaaagcttcttttatgtgctgcttttcaatagggctcatactattgtagaaaagtttagcctgagaataaaagttaagaaagcttttactgcgacctctaattttatgcccatcaatcttttcttgataatgttcatatcctccttgttcggcttggacggttgcaggttgattgttatttaatccattaggatgatagcttgtttgaccgcgatgaatctgcatttgatgcataccatcacgttgattattatgaaaaggacatacaggctgattaatagggatttgatggaaattagggccccctaaacgagataattgtgtatctgtataggagaataatcttccttgcagaagagggtcatttgaaaaatcaatacctggtacgacatgaccagggtgaaaagctacctgctctgtttcagcaaagaagttatcaacatttttgttcagtgtcattttaccaactaattttacgggaacttcttcttctggccataatttcgttggatctaaaatatcaaaatcaaatttatgttcatcttcttctggaattagctgtaatccaagctcccattcaggataatcccctttttcaattgcttcgtataaatcttgacgatgaaaatcaggatttttcccggcaatcttttgagcttcatcccatactaatgaatgaaccccgagggtaggtttccagtgaaactttacgaaatgggcttttccttctgcgttaatgagtcgaaatgtgtgaactccaaaaccttccatcattcgtaaactacgcggaatagctcggtcgctcatttgccacatgaccatatgagtggactcaggattatgcgcaacaaagtcccaaaaggtatcatgagcgctagctccttgaggaatatcattatgtggttctggtttaactgcatggacaaaatcaggaaatttaatagcatcttggataaagaatactggcatattattacccactaaatcatagtttccttcatctgtataaaattttgtggcgaatccgcgtacatctcttactgtgtcgttggatcctttagaaccttgaacggttgagaaccgtacaaatacaggtgttttctttgaaggattagtaagaaaatctgctttcgtatatgtttctaaagattcataaagctgaaaataaccatgagcgccaaccccgcgtgcatgaacaatcctttcgggaattcgttcgtgatcaaaatgggtcattttctcacgaaagtgaaaatcctccattaaggttgggcctcttaagcccatctttaaagaaaattcatcttcagctatttttaccccttgatttgttgttaaagcatgtttgcattgattgtcagtaacgtgatgcttcaattgttccgtttttttattcacaatataggaccctcctttactctgttaattaatagataccctttttattaggtcgtaaacatgtattatcgtctttgtatgtaaaaatcataaaataccggttgtttaaatggttcttgtttgaggaggaaaaataaaaagccaaggagaaaatttattttctccttggcttttaagataattcttttcgttaaaatgcggaaattctttgcttcgtttttggtacaataataaatttgatccagagtaacccgacaatcataatgataaggctatgtaaaaattgacctgtagcaatgagtataacactcgaaaatacaatgagttgaatacttagcaatataaagattaagctaagaaattgcttcattctttctgcagtaccaatcggatataatgctacaataatatttcccgaaaaatatttccatagtgaacgaagctgcatagagatcatatataaaacgatgtaagcgatagcgccttttacgtatatatttggtatgaaatataaggcgaaagcaccgatcaatcctaagcgaatatatataccgaaataatcatttccacgtaaaaatgctagtgtatgtaagtagaagaaagttgctcgttttttatgtaataaaggttcaatccaatttgtaagccattttcttttatttacttgtttattcagttgcggaacatcggtgaaaatgctagcaaattgataaaaacgaacgttcattttttcttcttgctcgattatgtaatcccacggtattcgttttgtaggctgttttttcgtatatagaagtaggaaagcaagtagtaagagtagtccgcccaatatgagaacatttgcggaataaaacagcatgtaaatgattagggcgttacaagtaatacgaatgatcagccatatatttttttcgtgactatcacgccacatccaatgtatgtacatgttccaggctttcataatcattaacacgataaagattgtacataagaaaggtaccgttaattgcaatgattgcatagcaagtggaacgagaataaggaacgtaaataacaatgggaaaagctgaatgatgtaattgtatagaagagattttttgaaataagatgttaatttctcttctagtgctagtaaatagacagcatcaggtttttgaataaatgtacgtatagggcatctcgttataatgaatgtaagtacaatcgttataattattaaagatattcctttagaaggagatgcttttagaaactgagcataataatatgcaccaacgcatgaaataaagataaagctatatagtaaaccgttaatcatacgtgcaaagtatgtaatgatattttgaatatgttgttggaagcgactgctccatagcgattcgattgacatgtttttcacctctttgttctattatatatgttttacaaaagaaaaaacgagcaaattgcgttatgcaacttgcccgtttttcttttcgttattttttttctgatcacgattcattaatggatagaaagcaaatccaattacgaataaaccaattccgagaaggaacgtttttatatcggatgcgccagttttaataacccatagtgcgtagcaaagtgcgataactgcgactatgccatctgtaattcttgcccgcatttcatttttatatgtttcaccagttgcgactagttttaactggaagattggtgaaacgagatatggaatgaggtaggccagtgttgatacggtaataacgaatgtataagcttccgcaatggttcctgataatgttgagaataggaatacttgcgacataatgtttgttaatcgtaatgagtaaattggacttccttttttatttgttttcgtgaagaaggaagggaagaaaccttcttttgctgcttgataaggtacttctgagcttaataaaatccagcctaagatagaaccaaacagggaagtaagagcaagtaatgccatcaatttcccgccgccgtgacccattgcagcgtttagtgcatctgctaatggacgttcagaagcttgtaatttatcaacgtgaagtacacccattgttaaaattgtaattcctaagtaaatcgcaactgtaataagtaatcccgcaactgttgcacgttttaccgtttttggagaaacagcacggtttgataaaagaacggctgattcaattccgataaacgcccaaagcgttgtaagagcagctaaatttacttgtgaaagaagaccatgtgatgcacctgatttatcaatcatcggtgtgtaccattgtccaaacttagaagcttcgaatgcaaataacgtaacgacgatgaataaaaggaatccagttactttcgttgttgttgctaagaagtttagttttccagctccgcttacaccgtttgttaatataatatgagttccccaaagtaagatggaacaaatcgtaaatgtaattagttttccgacttctacgttaaacgagccgattgaaaatagtagtcgcgtatctttcataattgggaagaagagtgataaatatcccgcaaatgatgtaatgatggcaacgttacttgcccagtttgcaacccaatatccccataccatactgaagccagccatttttttcttttttggtgttgagaataaagcatatgcatgactttgtggccctgtcgttaaatcaggacgacgaattgctaaattaccgaaaacaagagctagcattaaaacaccaaaccctgtagttaaccaagctaaagtgacaccgagtgggcttgctgtttgtgccaacgtacttggtaccatgaaaataccagcgccaaccatgttaccgacaacgaaagctgttagtacccaaaagccccattttttttgttgcatagaaaaatacctccaaagttagtataaccaagtcaagcgaggagatatgtatgtcttcctgagtcaggaagagaagtcccaaacaaaacaaaaaaagcacgtaatctgccgctacatgctttctatcttataagaaacccacgacatacctctcgatagctctccacaaacgaaacgtttgtgacagttctgcacttattaaatgcagacccagcaagcgtgcatggtggacacgacttacttcggcaaccattcctttctcattccttcatcaatgccactacatctcctgaaatgatactcttaatgattgcaacctctacctcaccgagatacgaatgaggatttaaatattaaattaacgtctttaagagtaacaaatgaatttttatccgtcaatggatatagtaataatcagattatagagaagagtttgtgattaaaagtgagttaggagaggctgtaacgattattagttctgcagaagaaacagcgatagagttaagtactattttacagcacaaaggaattttgtctgacaatctgaatccgaagcatcgcttttttacaacgggatctgttttatcatttgaacatatcgctgagcgatggctagggtatcaaatttctgtagaatgtgtacatttgcctatgaaaaatgcgtgtatacataattaagatttagtaaattactttttttaataaatgaggttcgtttcataagaaggaaagaataagcttttaattgaagtgtttaaaggcatttcaattaaaggggagatttgattatggaattatcaaggtctcaattatttgctttagagtatatttcaaaatatgcagagaacgaaaaacgtggggctaaagcaacaattaatcatatacttaaaatgtcaaatattacagatgaaatatttgaagaagctgtcgctaatttaaaatctcatgcaaggattgctttacactttcatccagacagactagattcgaatatgaaaagtgttgctgaagcactgtttgagcaaggagtatataaaagtcagtttgaaacattgctatctaatggaagcgtatctgcttaccctggtggtgaacgtgacctttgggaaaagagaatatttggaggggcatatcaattagaaggcgtaacgaatgatcaacggccaaaatacggagcgctaaatttaatgttacatccagatgggccggctccgcgttttggttcatgttattttctcttatctccaaaagtttcttcgcgctctacatatacatatttagattcgcatcaagatccgaaagaaaaggggacttatgaggagtttgatatgattttagctgctcttttggaagagacattcgtaagagattttgcaattggtgaagggaatttgacgccaacaatattaattaatcatttactagctaacctgaaaaggccgtttatagatttagtaagcaaagagccagcccgtaatcttaatcattatattgaagcgcagattcatggagagatttctcttaaagaagacgtggaggcgcttgttgcagatccttcatttaagggtacggatgtagggaaagttttagaagaaatttgcctgaagtatgcgattgatttgtattggcacatcggttttgtacttatggtagacgaagttccaatggattttagaggttcaaaaatgccatctttagcaagacgcattgcacggaatcattgtatcgatgcaaatataattggctctgctgtagtagatttgaaatgcaatccattatcttggagtgatcgtggaacttatgaagaagtgcttcaggaattaaaattattatggcatgttttagttcgatttggaaaaccaaatcggaagtagaacgaaatacgctgttttttggaagtatttatatagaaaagaagctgatctatttatagatcagcttctttttataagattaaactaagtttaatacagttactttttcacgtgtcatagactcaaggctcttacgaataccttgtgcgcccatacctgaaccttttacaccgatgaatgggaagtggtcagggccgcgctctgtacgtccgttaatttgaacagaaccagtttcgattttattagcaattgcaaatgctttgttaatgtcttttgtgaagacacttgcttgtaagccgaactctgatttgttagcaatttcaattgcctgttcatctgaagaaacacggatgattggaaggattggaccgaatggctcttcccaagcaactttcatctcttctgttacgtgatcgattaatgttgggtaaattaagttacgctcacgtttgttaccgataacgatcgtagcacctttttcaacagcgtcgtcaactaaaccttgaacgaagtcagcagacttgtcatcgattaatggaacgattgtgctatcttgctctggagatccaactgatagttccgctacttgcgcttttaataagtcaacaagctcgtctgctacgttttcgtgtacaagtacacgtttaatagctgtacaacgttgaccagagtaagagaacgcaccgcttacgatatggtttgcagcatcttgtaagtcagcatcttcacgaacgataccagggtctttcccaccaagttctaatacaagtggaatcattgaagcttttttcgctaaatgtttacctgtgtttgtaccacctgtgaacgataccatattgatgccttcgtgttctactaagtagtcaccaattacagaaccgcgtcctgtcgctacgtttacaagaccttttggaaggccagctttatgtagtgcttcaaccattttgataccgctaattgcaccttgagttgctggtttgaaaataacagcgttacccataattaatgctggtgcaagttttgcagcagataagtttactgggtagttaaacggtgcgattgctaatacaacaccaagtggtgcgcgttggataatcgcaagtttagattttgtaccgcccgggaagctatcgcccatcatgctttctccgtgcatatgtaaagcttcttcgatcgtgtaacgaatgaagtcagctgtacgaacaacttctttcttcgcatctttatatcctttaccgacttctttcataatgatatcggcaatttcatcctgcatatttacgagctcatcagcccatttatataaatattttgcgcgatcttgtagagaagcttctgcccatgatttttgagcttcttttgcagatgcaattgcttcatctacttctccgcgagtaattgcttgtacttgtccaattacttcgtgtaagtatggagatggaatttcgattgtttctcctgaagagctttctctccattctccatttaaataaaatttgtacgtattgctagttgtcatgattagtcctcctaaaatagcaacttgtaagagtgagtataaggtgattgtagggggtttgataacatttttcaaatgaaatgtttgtgaaaacgatttcttattctttttttattttgtatgccctttcttacagaacattcccttatttcaaaatggtgtatcatatatttttatttgaagtgtgaaaaaataattgacagaatactcaataaagttgtaagattataaatggaaaataaatgaagggggtgtgcgtaatgattgtaatcgtaaatgtaatgggcttagctctgttaaatggcagaaaacattcatatcattacgcaacccgtacggatatatagggcatctttgtcttataaaaagcgtacgttgcgtatatcgtaacgtacgctttttatgcattcctgtgcatatcgtcaagcggcggtatgcttttttttgtttattttcccttgtttggttccgataaaaaactttggaaggtggaaaaatgtgatgagattgtatgggttacgaaatgtaaatgtgatgggtctggatagtggataaagaaatgagaggtaaacgagaacgagaagggagaggttacattgttatcagtattactaaagttaaaatggttttttagggagcactggaagagatatagtattgccattggagctcttttaattgtgaatatagttgaagttattcccccgaaagtgttaggggttacgatagataatataaaaacaggaacgttatcgaacgaagcaattatgcaatctattcttattttaataggggttacaatcgttgggtatggtcttactttcgtatggcaacatcaattgtttggaggtgcatttgtacttgagaaaacgatgcgctctaaatttatggggcatttacttaagatgacgccgactttttatcaaaaaaatcgtactggcgacttaatggcgagggcaacgaatgatttaaaagcaatcgctatgacagctggttttggtatattaacgcttgtggattctagtttatacatgcttacaatcgtttttatgatgggatttacaattagttgggagcttacatttgcggcacttataccgcttccgattatggcgtatgcgatgaatatatatggaaagaaattgcatgaaagatttactgttgcgcaagatgcattcggtgatatgaacgataaagtacttgagtcaatcgctggtgtgcgcgttattcgtgcgtatgtacaagagaacgcagatcaagaaagatttcatcatttaggagatgacgtctacgaaaaaaatatgaaggtagctagaattgatgcactatttcagccaactgtgaaaatgcttgttggccttagttatttaattggtttagtgtacggcgcatatcttgtatttcaatcaaaggtgacacttggtgaactcgtttcatttaacgtgtatttagggatgatgatttggccgatgtttgcaattggcgaattaattaatgttatgcaaagaggaaacgcttcgttagaccgtgtaaatgaaacgttagcgtatgaaccagatgtaaaggatccgaaacatccaaagcttgtgcaagagccggattatattcagtttgatgatgttaccttttcatatccttcatcaactgaaacaaatttaaaaaaggtttcgtttacattaaaacaaggggaaacgcttggggttgtcgggaaaacaggaagcggaaagacgacgcttgtccgtcagcttcttcgtcaatatccgcttggagatggggatattgcagtctctgatgtgacgctggataaaatgacgaatgaaaatgtactcggctggattggttatgtaccgcaggagcatattttgttctcaaaaacagcgcgagaaaatattttattcggaaatagggaagcgactgaagaagaactagagaaagcgattgaaattgctgcgtttaaaaaggatttagagtttttaccagaagggttagaaacgctagttggagagaaaggtgtttctttatcaggagggcaaaaacaaaggatctcgattgcaagagctgttattcaaaatccagaaattttaattttggacgattctttatcagctgtagatgctcgtacggaagcagcgatcattgaaaatataagaacggaaagaagcggaaagacgacgattattacgacgcatcgtttatctgcagtgcaacatgcggattggattctcgttatggatgaaggcgcagttatagaagaaggtacgcatgctcagcttatccaaaagggaggctggtatgctgaacagtttgaaagacaacaaggtgaaagtgaaagtgcggatagtggggtgaaaatatgagcgtttcaaaacgattgtttcaatacgcgatgaaagtgaaagggacgatttttgctgcgatgttaatgttatttattttcgtcatcgcagagcttgctggtcctttcgtcgctaaaacgatgattgacgatcatatcgtcgggatagagaaaccttggtatgaaacagaacagagtgaagatgctgtttcgtataatggggctttttataagcgaagtgatcgctttgaacaaggcgagaaaaaagggaaagaagtacgcgtgatgcaagtcggttttcaatattattttgtaccgaataaagtaaatgcggaaggatcacgtactgtaaaaggggatatgattaccgttcaaaatggtaaggcggtgcaagtgtataaagcgaaagcattgacgaaagaagaagtgtttgcgttttataaaccagaaataaaccgtttactcctacttggtggtggctattttgctttattagtagtcgtatcattatttgcatacggaaagcagttcttcttgcaaaaggcagcgaacaaaattattcaaattatgagggaagatgttttttctcatattcaaacgttgccaattcgttatttcgatcatttaccagcagggaaaattgtgtcgcgtgtgacgaatgatacggaagccattcgtgatctatacgtaacggtacttgcgacattcgtttcaagtatcatctatattattgggatattcgctgcgctatttttacttgatgtaaaattggcgacgttatgtttactcattatcccgattttaatcgtttgggcaattctttatagaaaatacgcgtctgtatacaatcataaaatgcgctctcgtttatctgatattaacggaacagtaaatgaatccattcaagggatgccaattattcaagcgttccgtcaagagcgtgaaacgaaaaaagagtttgaagaattaaatggcgattattttaagtatcaaaataaaattttgaatttaaatgcagcaacttctcataatttagtatccgtattaagaaatatcgctttcacaggtgtgatttggtatttcggtggcgcttcattaagtgctacaggcgtcatttctctagggatactgtatgcgttcgttgattatttaacacgattgttctcaccgattacgaatatggtgaaccagcttgctaacttagaacaatcgcgtgttgcatcagagcgtgtttttgaattgttagaggaaaaaggagaagcagtagaagaagagcgtatgcctcgcttacaaggaaatgtgaagtttgataatgtatcgttttcttataatgggaaagatgaagtgttaaaaaatatttcttttgaagcgaaacaaggggagaccgtggcacttgtcggtcatactggatcaggaaaaagttctattatgaacgtactctttcagttttacgagtttgaaaaaggaaagcttacgattgatggtcatgatgtaaaagagatgccgaaacaagcaactcgtgaacatatgggaattgtactgcaagatccgtttttatttagcggaacagtagcatctaatgtaagtttagaaaatgaaaaaatttcaaaagagcgcatcgtaaaagcattgcgtgatgttggtgctgaaagatttgcgaacaatataaatgaagaaattacggagaaaggaagtactctttcaaccggagaacgtcagcttatatcgtttgctagggcgctcgcttttgacccagccattttaattttagatgaagcgacatctagtatcgatacagaaacagaggcgatgattcaacaagcgctagaagttgtgaaaaaaggaagaacgacatttattatcgctcaccgactttcaacaattaaaagcgcagatcaaattattgtgcttgatagaggaaccattttagaaaaagggtctcatgatgagctaatgaaaaagcgcgggcgttattatgatatgtacaaaacgcaaatggaagggaaccagagcgcttaataggtatgggagagaacttgtgattttcacaagttctttttttagtgaatcagggcagttaaataagaagtattattttacctttcgtacaataaatgctatattaaaaaatgttacttattttttgtatgtagcattatttttcccttttgtttgattatgaagaaaaaggataaactaaataagaacattttcattgaaaaattgttcaagattgcatacaatcaatatagtttttaaattcctatcagaatacttggaggattactatcatgaagaaattattttcagtgcttgcagtaactacattagcgatcgggattgtagccggctgcggtaaagaagagaaaaaagatacagctagtcaagacgcgttacaaaagataaaacaaagcggtgaacttgtaattggaacagaaggtacatacgcaccgttcacattccatgattcaagcaataaattaactggatttgacgttgaactatcagaagaagttgcaaaacgtttaggtgtaaaacctgtatttaaagaaacacaatgggatagcttacttgctggtttagatgcaaaacgtttcgatatggttgcaaacgaagttggtattcgtgaagaccgtcaaaagaaatatgatttctctaaaccgtacgtttcatcttcagcggcattagttattgcaaaagataaagataagcctgctacatttgctgatgtaaaaggtttaaaaggagcacaatctttaacgagtaactatgcagatattgctaagaaaaacggtgcggaaattattggtgtagaaggatttagccaagcggcagaattattagcttcaggacgcgttgattttacaattaatgataagttatcagtattaaattatttagaaacgaaaaaagatgcaaaaattaaaattgtagatactgaaaaagaagcttcagaaagtggattcttattccgtaaaggtagcactaagcttgtacaagaagtagataaagcgttagaagatatgaaaaaagacggtacgtatgacaaaataacgaaaaaatggttcggtgaaaatgtatctaagtagtgcattagtttcagatcgattgtctacttggatagatattatgcagacttccttcatgcctatgctgaaggaagctgtttttacaacaattccattaacgcttattacatttattatcgggattatacttgcaacgttaacagcgctcgcacgtatttctggtagtcgtattttacaatggattgctcgtatctatgtatctatcattcgcggaacgccacttcttgtacagctatttattattttctatggtcttccaactcttaatattgaagttgagccatatacagcagcagttgttggattttcattaaatgtcggtgcatatgcatctgaaattattcgtgcttctatcctttccattccgaaagggcagtgggaagctgcttatacaattgggatgacatacccacaagcgttaaaacgtgttattttaccgcaagcaacgcgcgtatcaatcccgccgctttcgaatacatttattagcttagtgaaagatacttcattagcatcgttaattttagtaacagaaatgttccgaaaagcgcaggaaattgcggcaatgaactacgaatttttaattgtttatttcgaagcaggtcttatttattgggttatttgtttcttattatcaatcgtacaacagatgttagaaaagcgttcagaacgctatacattaaaataatccttttacaaaaggagtttttgtttttatgatttcaattcagcatttacaaaaaagtttcggagataataccgtactaaagcatatagatttatcagttgagaagggggaagtggttgttattatcggtccatctggatctggtaaaacgacattcttacgttgtctcaatgtattagaaacaccaaacgctggtaatattcgaatcggtaataaagaactcgacttctctcaaaaagtaacgaagaaagatattgtcaatcttcgtacgcaaacaggtatggtattccagcaccataatttattcccgcatttaacagcacttcaaaatgtaatggaagggctcgttacagtgaaaaagatggggaaagaagaagcgaagaaaaaagcaaactatttccttgaaaaggttggtcttgcggataaagtagacttatatccgttccaattatcaggcggacaacaacagcgcgttggaattgcgcgcgcgcttgcgatggagccggaagtgttactatttgatgagccgacgtcagcgcttgatcctgaactcgttcaagaagttctgaaagtaatgaaagaacttgctaaagaaggcatgacgatggttattgtaacgcacgaaatgcgttttgcacatcaaattgcaaaccgcgttattttcatggatggcggtgtcgttgtcgaacaaggtacaccagaagaagtatttacaaatccaaaagaagaacgtacgaagaagtttttacaaatgttgcaataaattaaggaaggtctcaaggcatatgccttgagacctttttgccatatatatttatttgtggaatccgccaaggctttgctcagccattgcaactagacgttttgtgatttctccaccaactgaaccgttagcgcgagccgtagaatctgctcctaattgtacaccaaattcttgagcgatttcgtacttcatttgatcgattgcagctgttgcacctggtactactaattgatttgaagaattttggtttgccataggaatatatcctccttagagttataaaagtttttttggttggactagctggagttgaaccagattatcgccccgattggcgctaatccatcggtaattaagtttgtactcatagtatggatgttacctagaaagatatacaaaataataatttgtaaattttgtcaaaaaaacttattgatttcgtaaattatgaaataagagtaatcgttgtatttttaagaaaacaggccaaactaaggaggatattaaatataattttctcattgtagcctgctacttgtaggctaattattagcttcttatttatgatttattgaaataaaaatgaaatcggtagcaactttatagttctatttttaagtagggatggagtgggcgctcctatgtttggataggttgctctcttcactctaaaaaagagaggctttaaacgataacgtatggaggaatcatgatggggatttgcccgctttgcaatgcattagaatcacaaacatattcttgtcaaaattgccaaagtatactccaagattatgggaagtctgtagattatatagacgattatagtgcctatatggatcaagaattattaagtgcagtagatggtttaacgcataataattcaaatgaatattgcaatcatattttttattgcggagtatgtaacgtggaaactgaggttgtagtaaaacttgtgtaaatagaaaacttccaccttattatctaggtggaagtttttgtttttgtatttgtgagtgaatcataggagaagggatatgttcggtgtttgatgaagtcccggattttatctgggacattttttcctttgcatcacgtaaggaatgttcagttaagtagatggcatattcgtaaaataattggcgtgtcagttcactttgttcttttaatttggcatcttggaatacagttcgcccaggtttagagttggcttcaaataaccacggattttcctttgtgtctaaaccgatatcgaaaccaatctcaccgatgtttccagttacttgctcgtcgagtgcataacttatttgcagagctgtttgttttaatttattttcaatttgaacttgcttcgttgaatctggaaaaagctcttgtagcaactttgtatcaccgccgctatttacatgagttgttaaactgcctttgccggcgattttggcgacgattgcactaactatccaattaccgaaatgatttttatttgtatgaatgcggaaatcaacaggttgaccatcaaagcgaagtaacgaaataccttgctgtacgataaacttttttaaatcatgtccttttaatacgtggtttagaagagtttctaatgattgatactttcttagtttattttcttcattttcgcgataacgacagtagtagcaattttctgtttgagaataaaatatttgatgaatatttctaccaaagctcccgtgtattggtttcatgtacactgatttatatgtgccaagaaaccgttctacttgttcgaaatgctgaaatgcttctgtatttggtaataagggtttaattgattcgtctttcataagaagttgatgaacttcccatttattgaaaaaccctgggttaaaccatggaatggagtagtcttgttctaactttctttttgctctgacaattggtttgtaattttccgcttgtcgattcggtagtcgatcgtaaatgacgtttggtaaaggaacctttttctttatccattgtttctctcgaaagaaatatccgttaattgtttcttcttcccagtttatatgttgaacgccaaagacgaatacgaacggtcgtaatgagaatggtggtgttaacaactcactgagagcaattgaacgatttcctaaaggggtagaagaatcatcgttaaagccagttgtaaaaatgccgattaatggtccgaaaataattgtttggttttgtgtgaatgcatgaatagtagttgattgaggcagtaaaagtttttcggcaatatgctttccgataataatttcgcgagtaaaggaataatgaatttttacttcttcacttgctatatgacgtatgccgaaggagagggatgtaataggtggtgtaatagaaaaaacgtaaggtaaagtaatgctatttggatgttcatctgaaatatttaatgtatatatatgttctttcaaaataggtttacctcctttcattatggtgtaaagcgactgaatttaagtggtccgtgaaatatcttttcagctaatgaatcactatgacgaatgtattgttcgtaaggagggatcgtgttgacatacataagccagattgcacctttttgatccataattgtggaaagttctagttcaaataacgaagaataagactgatctagtgtttggaatacttcatttataatgtcgtgtaaagcgtcgtgcaatagttgcacacctgtactagatagtacgtatttaatttttgaaaatgaatgcaatgaatcatcgtccgttgctgagggtaaaagctgattaggaaatgagcttttttgtataaattgaccgataacattccaagtttgttctttgtttttttgcaaaatggttcgaatgtgcagtggatatgttaattgatttggtggttgtagcatagtgtgcgctatgtaacgtgatgaacgtatgttagatttacaccaagatataaattcgtctgtgcgtttgattgaaatagaagtatggtatttttcatttactgtatcgatctgaaacgttttatttttgtaagcgactcgatataagttatctttagaatgtatattagtggggcgtataataatatctttagtttttaacaacagtttgaaaatgttttgtatcgtcgcaatttcaaattttggtatataaggagacagttttttattagtgagaaataaatcatgtagttcacttgaattaataagtgtgttatttaaaaaggtagtggaaggacgattgtgcaaagagtgaataattgattttactttttcaaagtctgtttcctcttgaaaagaataacgatcatatatataagaaggaatagggaatgtttgctttttccattttcctgtatctgtatcgtaaataagaccagaaacaaggtctgttttaggatcaatacaaaatggcgtaaactgggcaacgacattatgataaagccgagcgcgtttagcgatttcggtgtaatacgtttgctcataatgaagtttagaagttaaaaggccgagaaccaacgaaatcactcctttactactatttgcataataggcgaagctatatattgcaaatacgtttttataccattatacttttgtccgtatgatgatatgctatagttttggagaagtgaaaggttgattgtaatgaatatatggttaaatatgttaacgacgacaggactcggagcaattattggaggatatacgaatcatttagcgataaaaatgttatttcgtcctcatcgtcctatttatatcggaaagtttcaagttccatttacaccagggttaattccgaagcggcgtgatgaacttgctgttcaattaggaaaaatggttgtagaacatttgttaacaccagaaggaatcggaaaaaagctaacaaatgaagagtttcaaaaaggtttaattcactgggcgcaagtggaagtggataaagtaattacgaatgaacaatcactgcgatatatgttagaaaaatggaatgtagcacatgtagaagaagaagcgactcgaaaaatcgaacatgtgattacagaaaaaattcatgcatttttagcagagtattatacatatacatgggaacaggctttacctcattctgtacatgaaaagatagagaatgcgattccgaatgcctcggcgtttattttagagcgaggaattagcttttttgaaagtgaagaagggaaagcgcgtctttcaaaaatgattgatgatttctttgcttctcgtggaacgctacttaacttagttgggatgtttttaggaaatgtaagtgttgtggatcgtgtgcagccagaagttattaagtttttagggcaagatgctacaaagcagcttttaactgacgtactgcaaaaagagtgggaaaagttaaaaggaagagatgtaaaagaattagaagcatttgtagagaaagaaatgattgtaagctccgtgctgtcagcagttaaagtagaggaaacagtgagtaagtttttaaatcaatctgttcagcaagtatgtgaaccagttcgagaaacaattattgaaaaagtggttccaagtgcagtaacgaaaggcttaaagtggggaacagaaaacgtagagagtatactaaacaatctacaccttgcggaaattgtccagcaagaagtgtctacattctcaacagaaagattagaagacttagttctgtctattacgaaaaacgaattgaaaatgattacgtatttaggagcgttattaggcggaatgatcgggctcgtacaaggattgttactattgtttcttagataataaggtgagtacatagaaataaaagtgaaatttcttcacatctcttgcatagtttgatatggtaagaagaggtgcgtatgtaaatgcactgaaaaggcagtgcgtatgaaaagcgctagccttctaaaggaggaaaaataaaatgacaaagaacattcatgatgttgcatatgaattacaaaaagcaatcgctgaaaacgaggacttcaaaactttaaaagagagctacgcagcagttcaagctgacacagcttcaaagaacttattcgatgagttccgtacaatgcaacttagcctacaacaaaaaatgatgcaaggccaagaaatcactgaagaagacaaccaacaagcacaagaagttgtagctcgcattcaacaagatgctaaaattacaaaattaatggaaactgagcaacgcctaaacgttgtaatcggtgacgttaacaaaattatcatgaagccacttgaagaattatatagcgcgcaacaacaagcgtaatagtggaagacgctcctagtttaggagcgtcttttttgtttagggaatttaatagttatatcacaaaaactccctttcaaaatagccatttcttattgattattttgaaagggatatgtaacacatcggttaattttttttattgctgttaattgaagttttaatatttttttcgttcaaaaacttttcaatctctttttgtttcctcccatttattttctcaaggcgtttcgtaaaagaaaaattggccttgaataagttaccatcttgggcgagtttgtctaattcttgatctagctctacgaaaatatccgtagatgatgacataaattcatagatttcttttgaaggttttttataatcagtaggtaaattattattactaataaactcatggaaattcatatcgttttgtttcgctaaatcaattagtttttgtaatttttctcggtcagattccgtgaaattcttatcaaaatttgttgaagcgagagggataatattttcagataacttccaactataatctatataattttttatattttgtttcatttcgtcttcattaatagtttcatttttctttgaggaactaaatatattttctggaactttaatagcaacatctttaatagattgtacatcgttttcttccttaggttgtgcactgtttgaacaagctgatagaaataaaattgtaagtaacatgagtggatataaaatataatttttcatcttaatctccttttgcattagtgtcgttgcaaaatagctacattccatttcaaatatttaactaaagctacgtatagatgttttattatttgataacatatgacggatattagtaagccgatgcaaaaggctatgaatacattgtaaacatcggaataactgatttgatgaaaccctttaaagaatcctaatcctattaataagataggtgaaataattaataacggagtggcaattataagtgttagaagaagcggtaatagaaagagtaatacgaaaaaggcgataatgataaatataaagtttaaaagacttaagctcataacagaaaacagtgctgtcataatgttttttaggctgcgtttcttgtcagctttactgattacatatgaaatattaagttctttagcgatagttttagggtttcctagctttttagaaatttcctcttcagatattccatcttgtttaccactaataaaatgagtttcgtactccgagataatatcctccttttctaaattaggcatattctgcagagaggaactaagttgttccaaaaattcatttttgttcataacaatcactttcctttatagaatgatgaattacagttgagaatcttatcttctttctaaacagcacaatctatatctaccttttgaagggtatatataaattataaaaaaagattccaaataatggttattccattatttacaaatatatcatttgctattgttctttgcaaggtactataaatttgttaataatgtgaataagtggaagtatttttgtacatttttagaagagatataaaaatgttattttaagataaacaaaaggttgtaagcgcattctttaaatcttgtcaaaataatatcgaattcatattgttggaaaaataatgcatttgtaatataatgataaatgatacttcaccacattaattaactaggtgaaattaaaaatctttattacacaaattatgaaacaaaggaatgattagtttgagtacaggtgtaaaagtaaacgacgtgaagacaaaaacaaaaggagcagatcttgttgttgattgtttaattaaacaaggtgttacacatgttttcggtattccaggagcaaagattgactctgtatttgatgtattgcaagaaagaggaccagagttaatcgtttgtcgtcatgaacaaaatgcagcatttatggcagctgctattggtagattaacagggaaaccgggcgtatgtcttgtaacttcaggaccagggacatcaaatttagcgacaggtcttgttactgcgaatgcggagagtgatcccgttgttgctttagctggtgcagtaccgcgtacggatcgattaaaacgtacgcatcaatctatggataatgctgcactattcgaaccaatcacaaaatatagcgtagaagtagagcatcctgataatgtgccagaagcacttagtaatgcatttcgaagtgcgacttccacaaatccgggagctactttagtaagtcttccgcaagacgttatgactgcggaaacaactgtagagtctatcggtgcgctttctaagccacagcttggaatcgctcccacaaatgatattacatatgtagtagaaaaaataaaatcagcgaaattaccagttattttactcggtatgagagcgagcacaaatgaagtgacgaaagctgttcgtaaattaattgcggatacagaacttcctgtcgttgaaacatatcaagcagctggtgcgatttcacgtgagttagaagatcatttcttcggccgcgttggattattccgtaaccaaccaggtgatattttactagaagaagcagaccttgttatttctatcggttatgatccaatcgagtatgatccaaagttctggaataaacttggcgacagaacgattattcatcttgacgaccatcaagcagatatcgatcatgattaccaaccagagcgtgaattaattggtgatattgccttaacggtaaatagcatcgcagaaaagttaccgaaacttgtgttaagtacgaaatcagaagcggtattagaacgattacgcgcaaaattatcagaacaagcagaagttccaaatcgtcctgcagaaggtgttacgcatccacttcaagtgattcgtacgcttcgttctttaattagtgacgatacaaccgttacatgtgacatcggttcccattctatttggatggcgagatgtttccgttcttatgaaccacgtagattattatttagtaacggtatgcaaacgttaggtgttgcacttccttgggcaatcgcagctactttagtagaaccaggtaaaaaagtagtttccgtatcaggtgacggtggtttcttattctcagcgatggagttagaaacggcggtacgtttaaattctccaatcgtccatcttgtttggagagacggcacatatgatatggttgcattccaacaaatgatgaaatacggcagaacatccgctacagagtttggcgatgttgatcttgtgaaatatgcggaaagtttcggggcgttaggtcttcgtgttaacacgcctgatgaattagaaggcgtattaaaagaaggattagcagcagacggccctgtcattattgatattccaattgactatcgtgacaacattaaattaagcgaaaaattattaccaaaccaattaaactaatggaggcagatttgagatgactgttgcgcaattaattgatattgatgcaaaaaaaacgaaaatgagtaatgaagtatatcaaacatctacaatgcttgcgctattagatggtatatatgatggtgtgattagctttgaagatttgaaaaaacatggtgattttggcatcggcacatttgatcaattagacggtgaaatgattgcatttgataatgaattttatcatttacgttcagacggttcagcggaaaaagtagagccagaagaaacaacgccatttgcaactgtaacgttttttgaaaaagaaatgagttatacggtagagcgtccgatgaatcgtgaagaagttgaagcgttattacatgaattgatgccaagtaaaaacttattttacgctattcgaatggacggtacgttccgtgaagtaaggacgagaactgttccaagacaagaaaaaccgtatacaccgctcgttgaagtgacgaaatcacagccaatcttttcatttgaaaatacagaaggtacgcttgctggattttggacaccagattacgcacaaggtattggggtagctggattccacttacattacattgatgatgaaagaagcgggggcggacatgttttcgactatgttgtagaaaactgtacgatccaaatttgtcaaaaagctcatatgcatttagcacttccagaaacagcagattttatggcggctgaattatcaagagaaaacttagaggataatattgcaactgcggaaggtgcagagtaaaagggaagccgattcggcttctcttttattttgagttactcccgatatgcggaacaatgctcatcagaaatagaatagttctctttaccagttaaggctgatacttctactaattgatgtccaagcccatcccatcccatactgtaacagtatataaggatgaccatttaatattcccacgagcgagtcggaaagaataatagtcgttatctgttgttactaaaactttgttataaataatatttttcgtttttttattttgtaaaataaggacaaagtctagtttatcttcttctttcggaatttgtagtattcttgctacaaacattccatttgggtttttcttccttttatgtactttttctgattctatttttagttcaggtttgcctctcataatctctccctttaacatatgcttacttctttgaaacaaacggatgtccctcataataaaaacgccacggataatgtacagcttcttctgcatagtcgatattaatacgaggtcctgctgttattttatattgtgatgatatgtgttcttcttttggaactaattcaatatgtaacgtatcactttgtaacgatacaccgcgttcttctaaagtaattccgagggcacggcatagtttgccaggaccgttcgttaaatttttgtactgcgcttttgtaatttcggtcttattgtagcgcgctagttttatttcttctattccatctaccggctcaagggctcgaatgagaacaccttgcggggtgcccgctggtgctgtaataacgttaaagcaatgatacataccgtaaattaaatatacgtaagcatgccctggtgcaccaaacataacttctgtgcggtccgttcgtctgcctccgtaactatgtgcggccttatcatcggggcctttatatgcttctacttctacaatgattccgcttcgctttattccgtctacaatatgaacaagtttttgtccgagtaatttttttgcgacttctaacgtatcgccttcataaaaagaaggaggtgcctgcattgtactatctcctttactaagtgtatatgtatatagtaaaccaaattttcagtagtaattctaactcgttctatttatcgggtttatttcataaattatggatagagtacaacagcgaagagggggagtgcgacatgatttatcgcttactagctcttaatatagatgggacactactatacaacaatggaaaaattgcaaaaggattaagagaaacaattgaatttgtaaaaagaaaagatgtatatgttacgttatttacgagtcgtaattttcaatccgctcataaagtagcaaaggcgttaaaattagattctatattagtgacacatggtggtgctttcgtttcagcaacgttagataagccgtacgttcaaagaagattatctgaagagaagacttttaacattgtgcaagtgttagagcactttgattgtaacgtacgtatttctcatgaacggttttcaatcggaaatcgtgagagaaatacaccaaacttaattgcgcgcactgtattatcaagtgcagacccgttattttatccagttcaatttgtagattcgttaggtgatgcgcttcgtgaccatccggtagcggcgccaaaaattgatgttcttttccaaactaaaggtgaaaaagaacgcgggctaaatacattaagaaaagcattccaagatgtagagtatgttgaatgtgattcaaaacgaatagaaattttaccgcaaaatgtatcaaagttacgtggattacaattgcttggagagcatttaaatatttcgctaaatgaaatggttgcgattggagatagtatggaagatttagaggttattgaaaacgtgggacttggggtagcgatggggaacgcgcctgtagaattaaagcaagcagcagattggatcacacgttcaaatagtgaaaacggtgtagagtatatgattaaagagcatttccgtaagcaattcccgcttccgtttttgaagaatcataaaaatacaccgaaacgatgacagaaaaacgtagctttttggctacgtttttttgtttatcttattaaaaacagtgaaagcgttttaaaatatgaattgtgtatgaaatctatacaattcacttgaatcctttagaaaactaatgtaaagtggatgatgttgccaaaacagttacaccacatgaaatattcttcagattaattttattgggctcccatacgtaaaagtatttccgcatgacagtttagttcacgtattatttcaaaaatgaattgtagcaatcttattaagtagttgtagtgtttctttgttttatttaaatggattattttaagttaatgtgagtaaggtttggtacatatgatatgtacttctttttgtggttttaggaagtttaaaagggggaatgaatttcttgaggaaatcatttaatcaaaaaattaaaaagttaagtagtagtttaatagttgtattactaatatgtatgaattttttaatccatttaccatttaaagcagaggcagctacaacagaattaaaaggtttaggtgatgtatcttattacaacgccatcatttttggagatcatagtgcaacgagtgcggatattgaaggtgcgatggctgttcagaaaaatatgaacgcatcaagttatacagtcgtagcggctgcaactggagcaaataacttagctggagcaacttgggtagatgaaggatatccatcattattactaggcggtcaatttacgaaagcgggagcaggacaagtaattattcaagatggaacagtggcgatgacaaaagacggtgacccagatggcgcaatgaaaacatcatatgaccgtatctcttataaagagcaagcggagattgatgctaagtttaaagaatttagaaaagacgttgatagcgtaattgaggatgcgggccaattacatactgataaaccaaaatcgggtatgacctttggaatcggtgaagatgtaaagaatcctaatatttatgtctcttcaggattagaagggcaagaaccattcaatgtaaaggatgtttatcttccaaatgtaagtaacaaagattttattgttattcattcagatgcagaagaagttaattttggtggcggtgcaatcctgtatgatacgacagataagggcgggttcacattagctaatacctctcaagcatatgaccctaattccttcttcactgagttagctagtaaagtcatttgggtgttccctaatgctaaaaagataacaactaaaggatatggtgtagtaggtagtgtgtttgcacctaatgcagttgtagaaacaaaaggtggttctattaatggacaagcctatgttggaggattacaccaaagagatggttttgaggttcataactttaaatttaactggccaaagtggaataagccagcagctgaaaaaggacatttacaaattaaaaaagttgatgaaaacgatgaaaatattgttttaaaagacgcaaaatttgatgttatagacaaagataataacgttgtggctactgttacaacaaacgaaaaggggattgcggaagttaaagatttaccatttggtgactattttgtaaaagaaataaatgcaccagaaggatatataaaagttgatacaccagtcaaagtaacaattgataatacaaacgtaattgaacttgttatgaagaatacgagaaaagtagagaatggccaatttaaattattgaaaaaagatagtgaatctggtcaacttctaccaggtgcaaaatttgatgttatcgataaagatgggaaagttgtggaaacaattgttacagatgataaaggtgaagccttatcgaaacaacttccagttggaagctatacattaaaagaagtagaagcaccgaaaggatatgaattatcatctagttcagtttctgttgatgtagaggctaataaagtagtgactgtagatgtggtgaataaaaagatccccgaaaaagtaacaggtcaatttgaaatcgtgaaagtagatgcggaagataaaacgaaagtattatcagatgcagaattcgaagtgtataaagatggtaaaaaagtagatacgttacgaacagataaaactggtaaagtagtttcacagaaattagaaccaggaaagtatacattaaaagaaacgaaagcaccacaaggatataagttgttaaaagaagaaattgaagtcgttgtggaagcaaacaaagtagtagaagtacaagtagaaaacgcaaaagaactaggaagcttacaagtaatcaaaaaggatgcagagagtggaaaagttctagcaggtgcagaatttaaattaaagaacgaagctggtcaagtagttggagaagcgaaaacaacgaataaagacggtgttgtgaaattcgaaagcttagtgccaggaaagtatacgttagaagaaacgaaagcaccagaaggttataaagcgttagaagtaacagtagaagtaaatgttgtagcaaatgaagtagtaaaacaagaagttatgaatgaaaaagtgaaagaagaaattacaggtcaattagaaattacaaaggtagacgctaataatacaaataaaatattagcaggcgcagtgtttgaaatttggaaagacggaacaaaaatcgacacattaacaacaaacaagagcggtaaagcgacttctaagaagttagaaccaggagattacactttaaaagaaatccaagcgccagaaggatatactttatccgataaggaaatgaaatttacgatttctaatgaaaaaattgaagttgtaaagcttcaaattacaaatgaaaaagatacagaaaaaggtccggaaaaaccaggtgaaggaacagagaagccgggtgaaggaacagagaagccgggtgaaggaacagaaaagccaggtgaaggaacagaaaaaccaggtgaaggaacagaaaagccggatgaaggaacagagaagccaggtgaaggaacagagaagccaggtgaaggaacagaaaagccgggtgaaggaacagaaaaaccaggtgagggagtagaaaaacctaatttaccagaaaaaggacaaggttcttctaataatcaacaacttccagctacaggacacaatacgaattacgttccattcatcggttttatgcttctgctattaggaatacgtttaagattcatggctaaaaatagctaaaagatgtataaaaggcatcagagatatataatctctgatgccttttaagtgaatacagataaaatgaaaatatctatatggaatgataaatatgttaagcttcaattacgctaagcattctgtttataaatgcagctgcgtgtgcacgttgtgatggtccttttggtacgaattgattaaattcattaccttttacaattccgtatccatacactctttgtacttcttctttagcgtaaattaagttttggtctacgaatggtagttcaacttgttttgcaaaaataccagcgtgttttagagaacgatcgatcataataacagcttcttcgcgtgtaattgtagtatttggatcaaatgtattatcaccacgtccgcggattatacctgcgcttgctgcacgattaataccgtctcttaacgatgggtgtacttgttctaagtctgtgaaattagcatttccacttggtaattgtaaagcacgagtaattagtgtagcaaattcagcacgcgttacaagacgttctgggaagtacttgccgttcccttctccttgcataatgcctctagctgctaattgacgaatgtcttgttcataccatccacctgtaatgtcatcagttacgggatttttttgattttccttatagtatgtttcagttccttttaagaaagcatcccattgtccgcgttgaatcataaacgcagggcagttttttcctgaccaaaattggtgtttttggaccttatctagagaaatatttaagtcgttcattaaataagctgccaatttacgggcattttctaccgctttttcatagtttccatcttgattaacggcaatttcaattccgatagattcatagtttccagttttatttccagcatgccatccaacttcatttactggaagatgttggtaaatctctttatcatctactgtgaaatgccaagatgcggcgcgatcagctgttccgcgtgcttgattatctaagaattttgcatgatttagagcattggcacccttcgctgtattagctgtttcgtgaatcgtaatatatttaggtaccatcgggtagccagggcgaatatcgtcatttccttttgggacaatcatttctttaaatgtaacgccataaatattgtttgtttgtagagcttctggcgatctcaataaactatttttagcagtacgactgttttttaataatgaagcttttgtaccttcaaatgtagcagaaggtgcataaatccattttgctgtttcatttatttggactttaaaccaatttccagcttgttcagtaggagttatgacttgtggctgtagtttcccttcttctttaaatgattggaacggaagggcatgtatggaagcttcttcttttacgattaatttttgattagatagtttatgaatctcttgaacttctaagctattatcattgttatctatccatccagcgccagttggcgtcgttatgtaataagcatttccttttttctttgtcgccgttacgacttgttctgtaatctcgatattcgatttgttttttaaatcattcgcggtatataatgaatgtttttttgaagtgtatagtaggaattggctagtaacctcgatatcttcttcatgagtactatgctcattaacatgctctttaatacttttaaaaacttgatcttccgtatatacttcagcggatttttcagcactctctgcaaatgaataagtaggtgcaagaacagtttgtaatgcaagagagagagttaaaacactataaaatttctttttcatattttttttaacacattagattatggaatctagtgttaacattcctcctttttatattgtattttcactatgtatcgattttagtactaataaattttaacaagagaaaatcatgatgtctatatacatgagcgatattcataaaaagaattatttgaaaaaatgtaagagaaacaggtaaaaccttctgtattgacctgtaaacgcccttcaagtaaactaaagagagtttgcaaatgaaaaggtgataatgttgttaatttcaattaaaacgttacaagatgatcgttttttacgtccgctacaaaatattggcggcttattttttgaagatagtacgattggatttgaacaagaggaagcaaatcttatcgttgatatacacattgaggataatgtgaaagcatccgctcgattaacggatgttagcacaggaaatgtgtatgaagaaacattctcgaaagatttatctgctttcacagatgaaaaagagcgtatgaagcaagtgaagcatgttgtttcttatgtatatctttctgttcttcagcagttaactggtattgaacaaagctggggtattttaacgggagtacgtccgacgaaacttcttcataaaatgcttcaaaatggtatgtcaaaagaagaagcgcatcaagagcttcgtgaaagttatttaattcatgaagagaaaattgaacttcttcagcgcattgttgattgccaattagcagttgttccggatttataccgtttgaaagaagaagtaagtatttatatcggtattccgttctgcccaacgaaatgtgcatattgtacattcccggcttatgcgattaatggacgccaaggctctgttgattcgttcttgggtggtttacattatgaagttcgtgaaattggtaagtttttaaaagaaaaaggtgtaaaagttacgacgatttattacggcggcggtacacctacaagtattacagcagaagagatggatatgctgtatgaagaaatgtatgaagcgttcccagatgtgaaaaatgtgcgtgaagtaacagttgaggcaggtcgcccagatacgattacgccagcaaagctagaagttttaaataaatggaatattgaccgtattagtattaatccgcagtcataccatcaagagacactaaaagcaattggacgtcatcatactgtagaagaaacaattgagaaataccatttagctcgtgaaatgggaatgaacaatattaatatggacttaattattggtcttcctggtgaagggttagatatcttcaaacatacgttagatgaaacagaaaagttaatgccagaatcattaacagttcatacgttatcattcaaacgtgcttctgaaatgacgcaaaacaaacgtaaatataaagtagcaggtcgcgaagaaattacagcgatgatgcacgaagcagcagagtggacgcaaaagcataattacgtaccatattacctatatcgtcaaaagaatattttaggtaacttagagaacgttggttatgcaatgccgacgcaagaaagtatttacaacattgtcattatggaagaagtacaatcaattatcggacttggttgtggtgcatcaagtaaatttgttcatccgaagacaggagcaattacgcacttcgcaaatccgaaagatccaaaatcatataacgatggctttgtgaaatatacagaagataaactgaaaattttagaagagctatttgcataagaagaaagaggttgttccgagtcggaacaacctcttttttatcctgcagtaacgggcggtccgattatatcttgtcagtttttgtcggtaagtcgatatattcgaaaaatcgctgatataattcgagttgcgctgatatattttgaaaatcgccgatatatttcaagttacggtcgatatatctggaaaatcgctgatataatttcatttaccgtctagtggtaccgtatgtaaaactatgtcgataataatcagaaaaattagtcaaatcattaaaggacaatgtctacttatggacgaaatgatagatttatgaaagagaaaagggggaaattgttggcatgtacatgacgatagggagaatttttgatttatcagttggtaagtatccgaataaagaggcgttagtggaacctgaaaagaatattcgctggacgtataaacagtgggatgaacaaataaataaaacagcgcacgctctattagaagacggagtaagaaagggagatacggtatctgtttacttatataattgccgtgaatttgtaaacgtttacttagcctgtgcgaaaatcggagcgatctttaacccgattaatttccgcttaaaggcgaaagaagtatcttatattcttcaggacgcatcctcgaaagtcgttgtctttgaaaaagcagttgagtcaactgttgctataattgaaagagattttccaaatacatctttttggtctatagaaaacgataaaccttcctatgcaagttcctaccatgaaaaagtgaatgcagcatcttctgagaaagtaaatatcgaaattgatgaaatggattattgttcaatgctttatacgagcggtacgacaggtcatccgaaaggcgtattacatcgtcatcgcgaaatgactgagcatagtatgatttgtacgtatttccttaaatataatagagatagtgtagggcttgtcgttgcgcctttatatcactgtggtgaattaaacgctggaatcataccacgcattcaagttggcggaaagaatgttattttgcatcattttgatacagaaacagtattacatacgattcaagaagaaaagattacgacgttctttgcagcgccgacaatgtggaatatgttgttgcaaaaagatttagctcagtatgatttaacttcgatgaagattggtatatacggcggagcagcaatggcaccggcgttagtaaaagaatgtaaagaacgtctttatattgatcttgttcaaatatacggaatgacagaaatggggccagttgttgcgtttctcgtagaggaggatcaaattacgaaagctggttcagcaggcacgccatgctttagccatgaagttcgtattgtgaaaccgaacgaggatgcaccggcagaaccagaggatgtattacctccttatgaagtgggagaaattattttgcgcggcccaactatgatggctggctatcataatcgtgaagaagcgaataaaaaatcgatgtataaaggatggtatcattcgggtgatctaggctattttgataaagacggttatttattcgttgctgatcgcgttgatgatatggtaattagcggtggcgtaaatatttatcctcgtgaaattgaagatttccttcatagtcatcctggtatattagatgtggcggtacttggtgagccagacgaattatggggagagcgtgttgtggcagttattgtgaagaaagatgaaacaataacagaagctgatttagaaacgtattgcaaagaaagtgatgaactagcagattataaacgtccgcgtcattatttatttgtagatgaactccctcgtaatgcgagcgggaagttgcagaaatttgtgctgagggagtcattgaaaggtgcgaaaaaataaaaaatgaaggataccccatatctatggggtacccttcatttttctatattaaacagaagaaacaatatctttgttaattctcatttcttcttgttgaaggttaattagcgcatttgaaataaggtggaaaaacaaaatggatgtaatgtccaaaaagaaaagacaccttaaggtgcctctctccgacttgaaccatttcatttcatacgaatctatccgtattaccattacccctttgttatgagtgtaaacacatactataaagcagaatcgtctatatacactagattgttagttcacaaaagacaagagatttgagatcaatattgaagtgacgccacatcccctataataattgatatgttacgccttttaaaagaatctgctttatagaacgtgcccacaagttatattttactacatgtaatattcatttagtgtattttttgatgaatatgtataattacataaactgtatgaaaaaaagagagtatactctgatgttgtgtaataaagataaagcccgcctacggaatagggggcttttcttactttttataaatatttattccaattatattatcagatgagtctaaacgaatataaacgtcatctgataaaaggtgtgcattatatattctttgtttatatgttgatatctcgaagcgttttccatttaattcacattctagaataatcatatcgccatgttctttccaatttattaatttagcagtcgtattcatataaacctcctctgaatcattttatgaaaattagtagagatagtgtgagaaaggagtttatataacaaaaaaagacaccttaagtgtcttctttgattactataaaagtcgttgaatgaaataggtttctatttttatttgcgtgaaaagccttcttcatcaaggtattccgcagcttctggataagagttgaatgtaccgtctaagtttacaccagcgtacacgttccacatgtcatcctctgaaataagagtaagaatatgaccatcttcgttctgccattcttcttctttcgcaggttctacaggtgctactacctcttcttgtgatagaaggtcaattgatttctcaattactgaacgtaactcctctgctgaaaactcacggatgttaaccatgcctttatcatctgttttataacctttaataccacttgcatatacaaatccatttccatttgggtgtaaatgaaatacaacgttctttttatctaaacgactttcttcaaagtggaagtttacacgttttaatgatacgttctttctttctagttctgggaaagattcaataatcgataatttttcttcaaaagttagcatagtgcctccaagtatatagtaaaagatttaatttgttcattatagcatagttgcaattgtttccaaagataaggggaaaacttttcgttgaatacgtttacgtcacgagaatgtaaaaagtgagctaacgaatgtatctttttaggtgtacaatggaacatggactttatacaaaggtggtttttttatgtttcaaaaaatagcaaaggaatgtttagcaggatttactgttgcgattgttgcgttaccacttgcgattgcatttggtattgccgcgacaggaacgtctgagggtgcgcttgttggattgtatggtgcgatttttgcaggtttattcgcagcgttatttggcgggacacctgggcaagtaacagggccaactggaccaattaccgttattgcaacaggagttattgcgacgcacgggttagaggcaagttttattgcctttatgatggcagggttatttcaaattttattcggtgtatgtaagctcggttcttacgttcgatatattccgtatcctgtcgtttcaggatttatgaatggtattgcattaatcattattttaggcgaaataaagcacgtacaaaatagttttttacttgttgtgttaacgattattgtaatgattgtttctggcaaatggattaaggcgattccgtctagtttagtagcactagtcggtgtgacagctttgcttcctttattttcttctctactcgaaggacttacagtaaagttaccgattatcggaaatctttcactaaataaagtaattgaaaagattggaaccattccagaagcgatacctacgcttcatattccatctttaagtggaacaggaatagcagcacttattttaccagcgcttagtattgctttattaggatcgattgactcgttgttaacatcggtcgtaatggataatgtgacaggtacacgtcataaaagtaataaagagctcgttggacaaggtatcggtaatatgatgagcggattgtttggcggattagcaggtgcaggtgcgactgtaaggtctatcgtgaatataagaagtggcggtaaaacggcactttcggcatgtatgcatagtgttatcttatttatttttattatgggtcttggttcggtcgtacaatatattccacttgctgtattatcaggtattttaattttaactggtattggaatgttcgattggggaagcatgaaaaagatgcatgtcgctcctaaaggtgatgtcgttgttatgctcgtaacgatgattgtaacggtgaagttcgatttaatgattgctgttgccttcggtattattctttcgttcatcatatatatggtgaaatgtaaagaacgtaaaacttctatcgtaaaagaaaaagaagaaacgtacacaattcaagggccgctctctttcctatcagtagatcgtattttctctactttacaagatgtgaagtcaccggttgttttacgtatgaaagatgtgcgttatatggatgtatcaggagctatggcattattaaattttgttgagcaatcaaataaagtaggagcaagtgtaaagcttgagcaagtacatccgagtattgaaaaaacaatcgcagtaatggcaagcgatgaacagaaagagcaattgaaaatcttaagtgtttagatagtaattagaatatctcacaattttacataaattataatgtagagttgtgggatgtttttataatgtttttagtaatatgtatcgcagtgacagagaggaagggctcttttggcgtaacagaaacgcttatagtgtgtacatatataatggaaggaattagaaaaatattgtgaagagacaggcttaaatgggttcgcttttctattttgaaaaaaaaaccaagtattcaacctataataaatttgttatgataaccaatgggataaaatgaatccctatcgcttaaaacaatatgtttgagagtatatgtataaaagaaaagagaaaaaatatgaataaaacatttgtaaaaggagcagcaattttaaccattacaacttttttgtcaaaattgcttggtagtttttttcaaattccattacaaaatattgcaggagatgaagtgctcggtatttttcgccttgtttttcctgtatatatgattgctcttacattatcggtagccggagttccacttgcaatttcgaaactaattgcagagttgaacgaaaaaaataagcaaaaggaaattgcgaaattatttaaatcagcgtcaattattgggatagcatttggcgttttcggctgtttagtcattgtattattttctattgaaattgcgaatatgctcggtggacaagaaactagaatgccgttgcttattacttcattagcattactcattgcgccatacatggcggtgtatagagggtattttcaaggtttcggtgatatgaaaccaacaggggtatcacaggtcattgagcaatttgtacgtgtgttttttatgttaataattgcttacatactagtatcatgggataagagtaatactgttattactagtggggcgatggttggctcttttcttggagtcattagttcgcttatatatttgcgtataaaatataatagaagtccatactacaataaaagcaattcctattcgctccgagatttaagagaaaacggcaaaaagatattgcgggtatcgatcccaatcgctatcggagctttatcaatgccacttttaaatttagtagactcgcttacaataccgcatgtattacaaggatcatcaacagaaattcaagaacaatttggaatatacagtcgcggttttgcattcacacaaataattgttatttttgcaagtgcaattgtatttccgttaataccactcttaacttccgcattggccaaaagagatataaatttggcgaaaataacaattcaaaatacaaatcgactagcgcatgttttgacagcaccgttaacaatatggttgatggcattaaccgtaccgttaaatgtcggattgttcacagacgtaaaaggcagtagtatgttaacagttatgattggcagttcgtattttactgcggttatggtattatcaataggtgttttacagggcattaaccgttctgcacaagctgcatggattgttattggtgcgagttgtgtgaaagtcatgctaaacatgatgttcgtgcagaagtttggcatagatggagcggcgtatagtacattaattacttacgtattgatttgtattgtaaatcatttgtatattcgaagctatattgcctattctattcatttaaaaagctttttcggtgtgctagcaatagcatgtattttgggactaggattgtatgaattatgtaatgtgatagatgttacaacttcaagaattatgacgttattattcagtggtatagcattaagtattacaaccattttgtatggtgtatgtgctttgaaattaaaatggatatcaataaacaaaataccatttttgaaaagataaatatagaaatttaattttttattataattcatatgaactgataaagaggaaactatgtagggtatcaagtgtttaggtaaggaatgggtactagtttatgttagatgaaataaacggttacctagttttggaggagatttagggtgcgtttagtcttatcaggatattatggtttttataatgttggagacgaggcgattctacaatcaattattgaatcgttaagtaaagagaacccggatatagaactagtagtactatcaaatgattctaaatatacaaaggaaatgtatggtgtagaatcggtagatcgctgggatataaaagctgtttatcatgcgataaaaaacagtgatggagttattagcggtggcgggagccttcttcaagatcagacaagtacgaagagtattctatattatacgggtattatgggactcgctcgattattaaaaaagccgtattatatttattcacaaggaataggtccaattacaaaaggatataatcgtctattagtaaaatggaacttgtcaaaagcttcctatgtatcagttcgagatgaggattcgtttttatatttaaaagaacttggcataaaaaacgatattgaaattgttccagaccctgttttaacatggaaacggacaaaacaatcggattggttgcaaaagcattcgatacatggaaaagtaattgcggttagtgtgcgttattggaatgcaaaagaagattatataaaaaaattagctgcggcattaaaaaaattaaagcaagaaggataccaaattctatttgttccaatgcatgagccatttgatcaaaaagcttcacgtgaagtagtagacttaatgggagaagagacgtatatgcttccatataaaatggatatcgacgagaaaatattcattttatcacaatgttcattactaattggtatgcgtcttcatgcactagttttttctgctgtagccaaaactccaatggtcgggatttcatacgatccgaaaattgattcgtttttaagtcaagtgaatcagccagttataggaagtgtggatggcgaatggagtgctgagtatttatatgaaattgcgaaaaagcaattaatgcaacaaggaactgtgcagcaagagttacaattgacaatagatgagcttcggttgcaaggcaaacaggcaacaaagaaactcattgatcatatggaaaaaggcactttattaaaaaagtaaagtgtcttttgttttgttttgaatttaatgaaaattctaattaaaaaacgttttattttaattcctatttattatgctaaaatgattgtgattattatataatcaaatttgtgataataaattcgtagattacgaggaggataaccttgaagactttttcaaaaggtataacagcagtggcattaacgggatcattacttttaactcctatttcaagttatgcggcaaatgatgatattacaggacatatgtttgagacgaatatgcgctcacttattactaaaggagttttaatggggtatggagacaatgtatatgcgcctgataaattagtaacaagagcagagtttgctacattcatagcaagggctttaaatttaccgaaagctgattcgaatttcgaggatgtgccgaagacttacggtttatatgatggtgtaagtagagcatatggagcgaaaattattaatggtcgtacgaacgagacattctcaccaaatgatgtgattacacgtgaagaaatgtcgataatggtaaagcgagcgttagactataaaaatattaaagtagctgtaagtccgcttacctttactgataaagatagtattaactataaagagcatgtacaagttatggtggctactcaaattattaaagggtatccagaagataatacatttagaccacatttatcagctacaagagggatggcttcagctatgttggatcgcatgcttcagacgattgaaaaaaacggaaatagcaatcctgtagaaactaagaaatatgttgtgacaaatgtaagagaaaacggaacagagcaagaagtagagcgctataatacgtataaagaagcggttacggctgctcaaaataaaggtatgaatgcggtaaaatacgagaacgaatttttatggattaaagatggttttgcaagtgcgaaaagaataactgggcaaaacatcattaatatttatgatgagaatttatcaacagtatatacgtatattcagtatggaacagaattgaaagtattagaagttggcgaagatcgtgtgaaagttcaactttctggtttgacaggttatgtgaagaagaatgaaatcactttaattcctacaaatgaaatgaaacagtcgtcttattatgtgaaatcagatggatatttataccataaatattatacatataatacaagttcacctggatatacagaatttagatatggtgtggcaccttctttcatgaagcaaggacagcaaatgtatagtgtagatggaaagacatttggagacgaaactttctatcaatatttcaattatttatcattacgttcgaaaacagattatacagctgaacaactagatagttatgtgaaatcgattaaaccagactctccattaattggtttaggaaagaaatttaaagaagtagaaagcaagtataatgtaaatgcattattcttatattcattagcaattcatgaaagttattatggaacaagcgctcttgcaaaagacaaaaataatttatttggtttaaaagcaacagacgatagtccgtatggtaacggagaagcattcaattcaaaagaagattgtattgaacatgcagcaaaattatacatgaatgaaggatatttaaatccaggacattggcgttatacagcaacatatacaggtgataaagctgctggtttaaatgcgaaatatgcatctgatgcgaactgggggaaaaaagtagcggggcatatgaaccgttttgattcttatttaggtaaaaaagaatacaacaagtacaaacttgcacgtgtgatgaataacgtggaagtgaaaaagaatcctagtatatcaaatgagcgactgtatcgtttaaatacaaatgtagttgtcacagttactggtgaagagataataaatggaaaagcgtgggttaaagttatttcagataatcctactgtaacagaagcgtatattgcaaaagaaagcttagaatacgtaaaacattaattaaataaaaaagaaggtgctactaatatttcgtagcaccttctttttattcaatttcaaaatcaacaatgatataagcgagtataacaacgaagaaaatactaacggctggtgctgttaatacgtggccagacataaagccaatgccaagtgatagaacgagtgtgctcgctaatagcatatactttactttcatgattttcttaaagtttgtgatcatgcggataaataatttaataccaaagtatagaagaggtattaagtaaataaggaaaccgacaattccaaaggcgaaaaataggtcatggaagtccatttcaattaatttaattttatctgtgtagttaccagcgtaacccattccgaatagtttttgtgaaagcggtgcgtctttatagtattgtttgtatgtttttaagaatttgtcgcgatcactgtaaattaaactttttacttcagaatctgtaagttcaccttttgcatgtttttttgcatcttctggatctgctttaattacttttccttcttttcgatctttctcttcttgtactgattttttgtattcgtatatttgcatgtgaatgcccatattttttgcgataggagtatgcggtgtaagagcaattaaacctcctagtataactgcgacaacaacggtatttacaatatgtgtgaatccttttccttcttttttacgatttatcatatattcaatgaatgagaagaaaagtgctacgcctaatgtaataacaattgcgccatatccgactttcgttccgaccataatacttgcatacatcgcaagtattgttggaatccagtaatatattttcgagaaagaagttgttttatgaatcgaatataagacaatgattgggaacataatggcgaaaagagaacttaaatcatttccagcgaagaaccaacctcttgaaccgatttttgagtgaggatagcttgggaaatccgttccagtttgcattgcgacaatcattgtaatgcttaaaattaaagttgcatataagaaatatgtaatgattttatggaatacatactctttattttttagctctttaaaggcgataatatatccaaacagtagcacaattggatatacgctctttaagatgaatttaacttcttctccaaatgaaactggagatttaaccatcatattatttacaagaccgattgcgagtgcgatcccgagtaagcacaaatagaggatgtactttttcgcatcttgttgtttgtgatgaagaagtaggtaccctaatgcaagaagcataaaggcgaaacggactacaactccaactgttgcgctcatgtgtagtatatagattgaaaaagatgttaataaatctaaaattggttgaaacacaatgaatagcaataggaaatgtgggaagtagttatccgtttgtttcaacttattaaccatatgttcctccagttcttcattcctttattacaacacctaaaataggggtataaagccttttttacatagtaaggcgaatgaatttcaatatttgtttttttatcaaacttaagaatacaccatttcattgtaatggtaaatagatgaaaagcatggataaaccgactttaatttctatatttttcaacggaattgtatgttttatacggtaaatgtacaaattgcgagattattagacagaaaattgagaaaaaagaaggatttttcagtggttttctataattatataagtataatctttatggagaaaagaggggtatgtaatggaagtaacgagtaaaacagaatctgttattgtgaaatatgaaggtaacgttgcaacggttatggtcaatcgcccagaggtgttaaatgcgttagatgagccgacattaaaagagttattacaaaagttgaaagaagtagcggaaagttctgcgcatatcgttgtgttatgcgggaacggccgtggtttttctgcgggtggggatattaaatcgatgctttcaagtaatgatgaaagtaagtttgatggcattatgaataccatttctgaagttgtcgtgacattatatacgatgccaaagcttgttattagtgcaattcatggaccgactgcaggtcttgggttaagtattgcgttaacagctgattatgtaatggcggatatatcatctgttattgcaatgaactttattggaatcgctttaattccagatggaggcggtcatttcttccttcaaaagcgtgtcggtgaaaatatgacgaagcaaattatttgggaaggtaagaagttatcagcgacagaagcgcttgatatcggcttaattgatgaagtaatcggcgaagatttccaaacggctgtgaaacaaaaaattaatgaatggtcacaaaaaccgattaaagcaatgattcaaacgaagcaaattttatgtgaagtaaatcgctctaatttagagcaaacattgcaattagaaaagcgtggtcaatatgcaatgagacaaacagcggatcataaagaaggaattgctgcgtttttagagaaacgtttaccagtatttaaaggggaataaagtgaagtgaggattttgtccattcctcactgattattagctcgttaattcgggataaaggggagaaagtgctaacacattttagtataattgtgttagcactttttttaaggagtaatacatgaagaaaatgatcggtgttattactattattttgcttacatattctgctttgcatagtacaccatctttggcagttcggactgcgttgttttttgagggacatccaagtgttgcattttctgacggggtgacgaaagaaaaagatgtgaaaaaagaagcgattccagatgagtatcaaactctatatggtaaggacgaagacttagagcactatttctttccacatgtaagagcacatggatcaggaattgatatgttaagtgcgtgcgtgaagaaaaaatggtttttctataaagcagagctcggatgttattaaatataggaggatgaatgatgtcagcatataacaagttagtaagagatcgtgttccagagaagattttaatgtctggaaaaacatatacagcacaaaaattaacagggcaagcatacatacaggctttagcgaaaattggaacggaagaaattcgtgaatttgcttctatgaaagaacgcgaacatgcgctagattctcttgcagatgcactagaagttatcatctcattagcacgtgcagaaggtgcatcgattgaagatgtagaacgccttcgtaagcaaaaagagatagagcgcggtggatttgaaaaagggatttatttattagacgtttcagaagaatagttttataggaaaagcatagcgttactgagtaacgctatgcttttttgttgcaatgaagctaataatgaagaagatagctgttaatatccagccgattgtaatagaagtagtagtgtgaatggcataagagatttgtaaacaaaataatgatgctaaaaaccaaatgagtgcaatgtgtatatatttttttgatatattcatattttataactccttttatatactaaaaagaattttactacaatttagaaaattaagctatataagtagaggttttctggtgaattttgtatactgaatagtagagaaaaagaggaggaaacgacaatggcacatcatgcgaaagaaacgatggaactgattaaggagcttgtctctattccaagtccatctggaaatacagcaaaaattattaatttcattgaaaactatgtcagtgagtggaacgtagaaacgaaatgtaataataagggagctcttattttaacggtaaaagggaaaaatgatgcacagcaccgcttattaacggcacacgttgatacgttaggtgcgatggtaaaagaaattaagcctgacggtcgcctgagtctttctatgattggtggatttcgctggaactccgtagaaggggaatattgcgaaattgaaacatcaagtggcaagacgtatacaggaacaattttaatgcatcaaacatctgtacatgtatataaagatgcaggtgaagcaaaacgcgatgagaaaaatattgaagttcgtattgatgagcgcgtattttcagctgatgaagtacgcgaattaggaattgaagtaggagacttcgtttcatttgatccgcgcgttcaaattacagagagtggatacataaaatcacgtcatttagatgacaaagtaagtgttgcaattttattaaaattaattaaaagattacaagatgaaaacataacattaccatatacgacgcatttcttaatttctaataatgaagagattggatacggtggtaactctaacattccagaagaaactgttgaatacttagcagttgatatgggagcgttaggtgatggacaagcatctgatgaatatacagtatctatttgtgcaaaagactctagcggcccgtatcattatgcactgcgcaaacatttagtagagcttgcgaaaacgaatcatattgaatataaagtagatatttatccgtactacgcatctgatgcatcagctgcgattcgcgcgggatttgatgtgaaacatgcgttaattggagcgggtattgattcttcccacgcatttgaacgtacgcatgaaagttctattgcgcatacagaagcattagtgtatgcatatgtaatgtctaatttaattgaagaataatttcatagataatagagagctgattaaagatattatttttaatcagctttttatttggcaaagcgattaggagacatgtcctaatcgcttttttatcccgctatttgccgggcagtaagactcctacctcaaaattcagcgaaagcaaaaaagttagatgggggcgggctgcccgtaaaagcccgattggtgagggctgattaaagtttttatatacattcattataagttatatatatgcgatttttgttatacggccggaaacgtatttactatagatatataatgttatacactatgaaagggattaattaatagttaatattttttagttagcttgattaaaaaaattgtatgaatatgaagttttgagaggagatttatttttcatgaagtacaaagcaatagccgcaggtttattagcagcaaatttactagcacatccaattagtagtttagcagaaacgaagaaatttcctgatgtttcagatagtgcgtggtcaaaagacgcaatttattatttagtagagagaaatgtaattaacggtatgccagatggtaactttatgccatacggaaatttaacacgtgctcaggcagcaaagattatcgcaacagcaattggtgctaaaatagatccaaatgcaaagccgtcttataatgatgcaaaaaatagttgggcagcttcatttattgcagccatggaaaaagagaatattattaaagggcgagaaccaggagtatttgatcctgaaggaaaagtaactcgtgctgaaatggcagctatgcttgtaagagcatataatctgaaaagcaaagtaacaggaccagttcctacaaaatttgctgatttagagaatcattggggtaaagaagaagttaatattttagtagaattaaaactttcattaggtacagaggatggctggaaaccgaatgattctattacgcgtgaacaagcagctcaacttactgcgcaaacagataaatttagcaagaatagtgatcgtccagtagaaacaaagaaaatgtacatagatagaaaattcattacatatcacgcaccatcattaagttctgggattagtgcaaatcagcataatccacaaatggttgaaattaaagaagaacgagatggatggatcaaaattgcaacaagtaaaggtgataaatggacacctttagtagagaaaacagaagttattaatgaaggattcactacttatgcagaagcttcttcttcttcaaaagtaatgggaacacataacgcacaacaagtaactgttattgaagagaaaggcagctggattcgtatccgcatgggcgctggtttccaatgggttaataaaaatcaattaaatccagtgaagcaaggtaacttcttagaaggaaaagcgattatcattgatccaggtcatggtggagcggattcaggtaatccaggttattatgagaaagaaagtgaaactgtattagatgtatcactacgattacagaaaatatttgagaaaaagacaccatttactgtgttattcactcgtacagatgatacacgtccaggaacaagtgcttctgattctttaaagaaacgtgtagaatttgcacaaaaaaataatggggatatttttgtaagtattcatggtaatggcacggaagagaaaaatggacaaggtacagaaacgttctactatgaatcagcgacagcaagaggaacaaatcctaacgtatcagaaagtcgtttactagcagaaaaaattcaagagcgtcttgtagatgcactgggaacaaaagatcgtggtgtgaaaaaaggcgatttatacgtaattagagaaaatacaatgccagctgtattagcagaattagcatttgtagataataaaagtgatgcagataaaatagctacaccagcgcagagacaaagtgcagcggaagctatttatcaaggtattttagattactatgaagaaatgggtaacaacgtgtcttctttccgttaataaataataagagattgccattggcagtctcttttatttattaacgtttctctttatttccggcatatgatatcatttaattttatatacaaaagaaaagtatttgagtaattgtaatcataacaattttaaacgatagaggatgataatagattgaataatcacagtaaaacacctgcctgtatatatacgtatgcatttcgtgaggaggagcgtgctttatgttacttggaaatgcgctcgttctttggaatggagtcccacgttaatattttaaaaagtgatgtcaaaattgacccgagtagaagtgcgtttattaaagagcgaattgaagttatgtatgaaggggacgacttagaaagcattttaaaacaagtggaacaaattgatttggcgggagcgacgttcaaagtcatcttcgttaaaattaatgaccttgttggagagaataaaattgaatatggagaaagacgtcttattgaaagagacctcggcatgcatattgaaggagaagcggatgttcgtaatccagagcgtgtattcgggattgttcctcttggaggacgctggtacttcgggcactatgtagaaagcgaaccagtttggtatcatcacataaaaaaaccgcatagttattcgacatctcttagcacacgtgttgcgagatcagttgcaaatatcgctgtaccaaatccagagggagtacgagcaattgacccgtgctgcggtattggaacagtagtagtagaagcactttctatggggattaacatcgttggtagagatataaatccacttgtagttcttggaacgagaaaaaacatcgcacatttcggatttgaaggaacagtaacaaaagggccgatcgaggaaattactgagaactacgacgttgccattatcgatatgccatacgacttatttacgcatgccacaccagaagatcaactatcaattctctcaagtgcacgccgcatcgcgaaaaaagtagtcgttgtcacgatggaaacaatggacgacatgatccatgaagcaggattcgaaattacagatcgctgtattacaagaaaaggatcatttactagacagattcttgtttgtgaataagaaagaaaggtcacccgtttgggtgaccttttttgtttgtattgatgtgtaatcggttggtggtttaggtagatgaattagcgaaatttgtcggtaagtcgatattacatgtcgaatcgccgatatattgtgttgaatcgctgatatattccgagaatcgccgatatcgttacattagaatgttactgttcttttaatttctcttgttgtgcaagtagtaaattgcgcaagatgtgcccgcggtaactttctagttttcgtccttcatgatagcgtacgcctaatttttttagttcagctacgtaccagccctttgttccgtaatacattggatcacttcctttttgcttttgaacagtatatgttgggggtggaagtaactttccagtgaaaataataagactggttgtatcaaggggctccataacatagcctctggacagtgtataaaaaaatagacagtaatgtatgcttttttaaacaatgtatacaaatttatatcctatgcgttggcatgatatttgcaataaaaagagtatcaacatataggggagagatagaaatgaaggttagtaaagtgtacacaacaattgatgctcacgtagctggggaaccgcttcgaattattacgggcggcgtgccggaaataaaaggagacacgcagctagaaagacgtgcgtactgcatggaacatttggatcatcttcgcgaagttcttatgtatgaaccgagaggacatcacggcatgtacggttgtatcattactccgcctgcgagtgctcacgctgattttggcgtattatttatgcacaacgaaggatggagtacgatgtgtggtcatggcattattgctgttattacagtcggaattgaaacaggcatgtttgaagtgacaggtgagaaacaacagttcattattgatagccctgctggggaagtcattgcgtatgcaacatataacgggagcgaagtagagtccgtatcatttgaaaatgttccttcctttgtatacaaaaaagacgttcctattaaaatagataactatgaatttcaagtagatatcgcgtttggcggagctttttatgcggtagtagactgtaaagaatttggcttgaaagtcgatttcaaagacttatctgctattcaagcgtggggcggtaaaattaagcactacatcgagagcaaaatggaagtgaagcatccacttgaagaaggattaaaagggatatacggcgttattttctcagatgaaccgaaaggagaagacgcaactttacgaaatgtaacaatctttgctgatgggcaagtagatcgttctccttgcggtacaggaacttccgcaagaatcgcaactctttttgaaaaagatgctttacaaaagggagaaattttcgtccatgaatgcattactgacgggaaattcgagggggaagtattgtcggtaaccgcagtagatacatatgaagctgtcgttccaaaagtaacggggcatgcctttattacaggatttcatcagttcgttgtagacccgagagatgatttgaaccgtggatttttgttaggatagaaggagggggtggaaagatatgttagtcataagcgcgaacgaacaaagaaacttagtaaatatgaatgaagttattgaatacgcggcgcttgctttaaaagaattttccgcagaaagaacgattacaccaataaggggctcattaccatttgcgaacgagcgaaatacggcattaattatgccttcagtagcggaagggcttgaggcacttggcttaaaagtagtaacggtagtcccgcaaaataaacagataggaaagaaaacgatcaacgggattgtgatgctatcagactttcaaacgggagaaccgctcgcacttttagaaggatcgtacttaacgatgattcgaacaggcgccttatcaggagtagcgacaaaatatttagctcgtcataacgcaaaaactttatgcattatcggcacgggtgaacaagcgaaaggtattgctgaagcaatatttgcggttagagatatcgaaaaagtcatcttatacaatcgcacagaagaaaaggcgtatgcatttgcggaatatatacaagagagattcaacaaacctgcatatgttcacacaaatgcaaatgaagcaataagcgaagcagacatcatcgtcacaactacgaacgcatccacaccagtcttctcagaaaaactacaaaaaggcgtgcacataaacgccgtcggctcattcaaaccgaacatgcaagaactaccatcccatgccatcgcgggagcaaacaaagtagtagtcgaatcaaaagaagcagcactagacgaaacaggagaccttcaagttccgataaaagaaggtctattcaaagcaaacgccattcacgctgaacttggtcaaattataagtggagaaaaagctggacgcgaaaataatgaagagattactattttcaaatcagttggtttggcagtagtagatattattgttgcaaagtatttgtatgagaaagcggtggagtgcgggattgggaataggattgagttttgagggactgccttttggtggtcttttttgttgatgtggatgtgctagtatttataattgaatccttttaatattatgttgcaatgtatgaattctgtgcggacatcaaatcattcattcaattggtatatgaaaaaagttgcccctctaattattagaggggcaactttttaccattctcgccattcttctgttatatcttcctcggattctaagccagctattcgtgctgctgtatcgataaattcatagagatcttctctttccattgtttcaataaaatagtcatgttcgtcatttaattcatttatgttaagaacaacctctttaacaacatgcattatttcaatttcagttggattttttcccaatttctctaaattatttatgtaagtatcaagaactttatttgttgcacttatattttcttcagtgaaaaattccccatcttcatcattctcaatccattgggttgttggtttgttttttttcagttcatcaaatgtcatgataacctcctaaatgtgttttttgtctttaatcccattctacattttcggtcatatataacaatcattttagagtttttttgtaagctactagttttttaactcattttacgaggtaacctattcgtggtcttcttttttaatcctccttataaatatattttatggcaagaatgtattagtagatttcaaactttccacatttacaaaaaagtttgactttacatacaggtagtggtaatttaaaacttataagaaaactcgggattaattccgagttttcttatgggtataactagtttgagggggccgaaagatgaaacggaaattatttgcattaccatttgttctaatactacttattgcattagcggcttgttctggggaaaaagattcttcgaagcaagcgggcactagtaaatcagggactccgaaagatggaggagggttaacgattggtgttagcgataatccagatacgatgaatccgctttatgcgaatgatcgtgtgtcattaactgtgcagcaggctttatatgcgccgctatatcatatggaagacggtaagaaaaagtttgttcttgctgagagctttacgccttcagaagatcaattaacgtggacattgaaattaaaagataatttgaaatggcatgatggtaagaaaattacatcagacgatatagcatttacattccaatctattttggatgagaagcaaaatagctcaagtcgtgaaaactttatttttaaaggaaagccgcttgaggtgaaaaaggtagatgagttaacaactcaattcgttttaccacaagtaagcgcatctttcgaaggtgtaatgaatgatttcttcccaattccgaaacatgtatttgaaggggaagcagatttagcgaagagtaagaaaaacttacagcctgtaggatcagggccgtttaagtttaaagagtataaatcagatgagtatgttgcattagatcgatttgatgattatgtaggtgggaaagctaaattagactctatcgtataccgcgttgtaaaagaccgtaatacagcaaatgtttcactgcaaaatggtcaaatcaacatgaaaatgattgagccgcaagactttaaaaaactagatagtactgggaacttctcaatggtgacattccctgaaggtagattattctacttatcttataacatgaatacagatttgatgaagaaaaaagaagtgcgccaagcaattgcgcatgcgttagataaaaaagaaatgattaactcagcattcgtttcgggtgaatttgcagaaccagcaaattcaatcttaacgccagacgctatgtattatgcgaaagatattaaaggctataagtatgataaaaaagaagcgaaagatttattagcaaaagctggtgtgaaagataaagaaaaagtacgtgtgatgtatgtaacgaataataaaattatggaaagcttagcgctttatacacaacaaaaattaaaagaagttggcttagaagttgaactaaatgcattagatgctagtgcggcaagtgaaaaaggcttagataaagagaataaagaatatgacattacatttggtggttacataatgggacctgagccagattcatataaaagcctattcttaagtaatgctgaatacaactatgcacgatataaaaacgctgatttcgataagttatgggaagaagctgcagttgaaacggataaaacaaaacgtgcagagctataccataaaattcaagaaacagctagagaagatgtaccttatctaccaattgcgtatccgaaagcagttattgcagtagataaaaagtttgatggattaaaagaagcgaaagcaattcctgtcacaatgtttgaagatctatctaagatttatgaagtgaaataagaaacaataaagaagctggtggaaatcagcttctttagcttgaggggggaagtttgtgtataaagtaattgcgaagaggcttttaaatgcaattccgcttttatttgttatttctattatttcttttctattaataaagctagcgccgggggatcctgttcgaaactttgtaacgccaaatatgagtccaattgatgtggagcgtattcgtaaaagtttaggactagatcaaccaatttacgtgcagtattttttatggttaaaaaacattttaacagggaactttggttattcacttcaaaatcatcgtcctgttttagatcttatcgcagaaagattacccgcaacaattgggttaatgggatcatctttactcgtctcattcgtaatcgcaataccacttggactatttacaggtgtgaaaaagaattcgttctttgaccgcattgtaaactttatttcatatgttggtatttctatgccggttttctggtttgcactactattagtctacttattctctttaaaattgaacctacttccgagtatgggtatgcgcaccgtaggtaaagattctgtttgggatattgtgcaacacggcattttaccttgtatggtgctagcgttccaaaacgtatctgtttatatgagatatattcgttcaagtacgattcagcaattagaagaagaatatgtacaaattcaatatgcgtacggtgcttcaaagaaaacggtgttatttaatcacgtacttcgaaatgtattaataccgatcattacaattttcggattatcgattccaagtttagtaggcggagcatttattacggaaacagtattttcatggccgggtcttggttcacttggggtaaatgctatttttagatttgattatccgattatcatggcaattacattactatcatcattcatgttaattctcggtaacttaattgctgatattttatatggcgtagtagatccgcgcattcgaatgagggggtgatttggaatgaataataggagatttcaaacgataaaacatagctttacgaaaaataagtttgttgcaatgggagttattatacttgcgattttaacggtcgcatcaattttcgcattcgtatcgccgtacgatcctagcaaaatgtcgattccagatcgcttacaagaaccgagtatgagtcatcctttcggaacggatgattacggaagagattacttaacgagagcgttatatggcggacgagtttcacttgcggtcggttttcttgcgatggttgtttctattacaatcggtaccgcagttggaacaattagcggatattttggcggaaagttagacaacttcttaatgagggttgttgaagtacttatgtcaattccatcattctttttaatgctactattaaatgcgtatttaaaaccaggaattacgacgttagttcttattatcggattactaacatggatggacaccgcccgtattgtaagggcagaaacgttatctgtaaaagagcgtgagtacgttttatacgcaaaagtatcaggacaaaaatcacttatgattattgtaagacatatcattcctaacattttatcaaccattattatcgctgcgacattaacaattgcgacatcgattttaatggaatcatcacttagtttcttaggtttaggtattagagaaccagattcttcttggggcagcatgctaaacaatgcgcaaggatatattggtgaagcttggtatttaacactcttcccaggattccttatccttttaacggtacttagttttaacgtaattggtgaagcattgaagaaagctttcgcaccaaaaggagccggacatgaaaactaaagtgttaagtgaagggagtgagaagcgtgtctgaaaaactactagaagtgaaaaatttaaagacttcttttttcatagaaagtggcgaagttgaagcggttcgcggcgttacatttcgcttaaataaaggagaagtagtcggtatcgttggggaatctggaagcggaaagagtgtaatggcgaagtccgttatgtctctcgttacgtcaccaggaaaagtgaaagaaggggaaatcctttttcataatgaaaacatactttctaaatctgaaaaagaattgcgttctattagaggaaatcaaatttcacttatctctcaagacccaatgtcagcgttaaatccggtcgtgaaaattgggaaacaaatgatggaagtaattatacgtcatcaaaaagtgaaaaagaaagaagcagagcaaatcgcggtcaacttgttaaaacaagtcggtctttcttcaccagaagaaagggtgaaacaatatccgcatgaactaagcggaggtatgaagcagcgagttatgatcgcaatggcgatgtcttgtaaccctgaccttctcattgcggacgaaccgacgacagcacttgatgtaacgatacaagcacaaatactagatttaatgaaaaacttaaaaaacgaaacgaacatggcgttacttcttattacgcatgacttaggaatagtcgcacaaaactgtacacgcgttatcgttatgtatggcggacttattatggaagaaggacctgtacttgatattttccaatcgccgaatcatccatatacgaaagggttattaaactctctgccgaaaatatcgaacggcgtaaaagagagactcgcgccaattcaaggtgtaacgccaaacttattaaacccgccacaaggttgcccattcgcagagcgttgcccgcatgcgatggacatttgtgaaaaagaacgtccaccatattttgaaatcggaaacgaaagacgttccatgtgctggctaaacgatagggcggtaggtgattttcatgcatgaagaaaacttaattgaagttcggaacttaaaaaaatactttcctattaaaaaaggactattcggcagaaaaacggagcaattaaaagcagtcgatgacttaagtttcacaattaaaaagggtgaaacattcggattagtaggagaatctggctgcggaaaatcaacgacaggaagaagcatcattcgtttacaagatgtcacttcaggtaacgttttattcgacggaaaagacatcgcaagtttaaaggaaagtgaactaaaagaatatcgaaaacgaatgcaaatcattttccaagatccatacgcatcattaaacccagcaatgaacgtattccaaattattagcgagccaatgaacattcacggctcttacgaaaaagaagaacaaaaagaaatcatattagacctgctcaaaaaggtaggcttaaaagaagaacatttatatcgctacccgcacgaatttagcgggggccagcgccagcgcattagcatcgcgcgcgcactatctgtaaaaccagactttatcctatgtgacgaaccaatctcagcactcgatgtctcagtccaagcacaagtcgtaaacatgctgcaagacatccaagaagaaactggagtcacatacttattcatcgcacatgacctatcgatggtaaggcacatatcagaccgcatcggagtcatgtacttaggaaacatagtagaaattgccgacagtgaagacctatacacaaaaccggcacatccatacacacaagcactactctcatccatgccagaaccagatccaacaaacattggcaaagaacggattatcctagagggagaagtaccgagcccactaaacacaccatccggctgcaaattcagaacgcgctgcaaattcgccactgaaaaatgcgcacaggaagtaccgaagatggttgagattgcgaaggggcatgaggtggcttgtcatttgttttagagggagagcactaggggggacctggtgcttttttcttttgtgttggggtgtgggattggttgtagattaatggtcagcgactgtctatatttgtatctcctatcatataattccctttattctttaactataatgctgggaaagcacgtaaagtaagacaaagtattaaaaatcatcgtgatgaagtgtatcgtattgatgtatgtattgtagaagatccgatggaaagagaaatttacgaaacatatatgattaacgaatttcaagcaaagtataatgtggataaagtattttataaataacatcaacgtaaaacatgatcttggtactacatcaagatcatgttttttatatgtaataaaaacaattgattattcttaatcattcgacaagatgcaacaatttaagatcatattttttgctatgataagtaaggaatttacatatcgtgttattgggggataaaaagagatgttgaaaaaatttactacatgtattttaggtggcgctttagtattcaatttatctggttgcggcaatacatccgacaaaacttcttcagaatctaaagaaaccaattctaaacaagaagaaaagaaagtgcaaacaaccgatgaggcgaaaacgaaagaaaatacaaagcagaaaaatacagaacaagcaaaagagaaatcaaaaataaaagaaaaagagtatgctgtaaacaaggattttcatacacctaaatttgatgtaactgtaaaaagagttgtagaaagagataaggttggtaaagagagtataggattccaaaaacctgaagatggacatgtctttattgttgtagaagcagaagggaaaaatatcacaaacgaaccgatgaaattagccgttttaccatcagtggatttagtggatgaaaatgataatgcttaccaaagtgatgtgttggcagctagtagttatgcggttgaaaaaggcgagacctctagtattactaagggattaaaaccaggggaggtaatgagagaaagtaaagtttacgtgattaataaagaaaaatttgatacaggaaagtggtatgtagttgttaaccatgagtataaggaacaaattaaatagtgtttatttatgaagaggagatggctcctcttttttttacaagttaacacagaatttctttataatgtagaaatttaatgttttcgaaaaaaagaattgacttctacattagttgtaactaaaatggttacataaagatgtaattaatttagttacaactaatatctgctaaaaatatgatttatatatttaattaaggatggtggtccatacgttgccacccggtgtagaaagttactaacacattcaaatcaatgcatattccaagctttagtattttctgttacggggcaataaggtgcaatgttatcttttgttaaaaaccttggtggatctttctttggaaatattagttttggggaaatatagtaaggtatctaaaaaagaacaaggtataaaaatatgtacttatataaaccaaaaatttagttgagctggataataaaaaaggtaggagatttaaatggagacgaaacaagataatcttatttacgtatgggatgcatattgtggatggtgctatggtttttcagaaagtattaaaggattttacaaaaaccacactgaattaccattaacggttttatgtggagggttatttttagataatttaccaatgaaaaacttctcatatatagaagaaggaaataaaagaattaatcaacttacaggtgctgaatttggtccttcatatcaaaaattggtggaggaagggacttttaaaatgaattcgaaagatgctgcaattggcttttcagctttacgctcattagcgccagaccgtttattagaattcacttcggctatgcaaaaagcgttttattatgagggccaaagtctgagtgatcctgaaacatatcgcaagattgcaatcgagcatggtttggaccctgaacaagtgttagaacgtttaaacgctcaagaaacaataatagatgtccaaaatgatttcaataaagttcgacagcttggtgttaatagctatccttcattacttttacaaaaggataatcaaattattcctattggtggtggcgtaatgacgccggataaaattgaagcgcgttttaaaaatttatattaagaaaatttaggatatagtagcaaacatgttatcttaggccacctgacattgatctccggaatattcgctagtactattacactttcagataaatgggagtgggagattttatcggaacaagataaaaatatgataattagttaataactttaacaaaaggagaataacatactatgtttaaaacaatcgatacaaatcaaaaagatgtgaaattaacggtgtttagttcggacgaaaaaagctttatggtcacagcaacattagttgagaaagcaggacatgcatttttaataaactcaaaatttactcaatctgattcgaaagaaattgttgagtatctgaaaaaaaacaacttatctttagataaaatctttattattcatggggatccagactactactttggattagagagcattaaagccgtttacccagaagctatagcgtatgcaacagagtctactgttgaacatatcgttcattctgtcttagggaaattaaaagtttggaaagacgcccttggagaaaatgcaccaagtaacgtggtattacctcaagtatttaaagaaaaagcgattgattttcaggggttaacatttgaactagtaggcttagatcattacagaactagcctatttaataaagaactaaaagtattaattggtggtatcgatgtatttaacgaaatacatgtattcttagcggatactagctcaaaagcggctatggaggcatggattgagaacttgaaagtattacaagcattacatgctgacataattgtgcctagccatggatcaatcgaaaaatccctaaataatcaagcacttactgcgacaatggattatctaagaacggcggttcaagcttctgaggaaagtggaacttcaaaagattttgtggcaaaacttgaagcagcatatccaggctatgcaaataaaggtgtattagaattaagtgcaaaagttgtaacaaaagaaatgccttggggttaatgatatgaataaatatcaaaaactattacatgaaacgtatgtgttaactggcgaagggaaattggatgcgttcaaaacgtatttaagtgaaaatgtatcttggacagaagctgctgggtttccatatgcaggtacttatataggtccagatgaagtagtgaaaaacgtacatgaacgtcttggcacagaatgggatgactatagcgctaaagatgaaatttatgcttttaataacaatactgttatcgtttatggaaaatatagtggaacatataaaactacagggaagtcatttgtagcagatttttgtcacctttataagtttgatgagaacgataaggttaagaagtttattcaaattgtggacagtgcaactgttaatgaggtattaagttagagttaatcgtttctaatatgccttgtatagggggaggttaggataaatgaaattcctaacattatccctgacattacattttggggaaggtttctccttcttcaagctttttatagaagaaaacttatttaagtagaagaggtaggtatatatgaaattagagaaaaatttaatcataacaattatttctgtatttattttaggagtagtttcgactttggtatatcaagcttccaccggtaataacaaagggaactcaataaagagcgaaaatgtcgcttctgtatcaaaagaagtaaaagaaaatgaaaagaataaaaagatggtagttgatttctataatgaagtttttaacaaacataatatcgatattatccctaaatatgttagcgaagattataagcaacataatccttttgttgctgatggacgaaaagccttcatggatttctttaaggaggattttgttaaaaatcctaattcctctgcagagattaaacgtgtagtagctgaaggggatacagttgctcttcatgtacactctcgtactaattctcaagataagggagttgctatagtggatatatttcgtatcaaggatggaaagattgtcgaacactgggatgtaattcaagagattccaagtgaagcagctaatgataatacgatgttttagatagaagatatatttaataattgtttaattgatagtgctgtatagagtttagaaatttagataattagtcatcaaatttggaaatcatttaaaaatagcatattaaatgatggcacaaattaatacgaaatagctctttaataaaaaatcctactcattaaaaaatgagtaggattttttattaaagaatagtgctaattttgtggttcggcaccatctaaatttggaaaccatgaaagtataggtactctatatccacgtaaagtaaaatcgtaattttttccttcttttatgtttgcttgcagatccactgaatgaaacttcatcataagaaggctatcctcattagaaataactttttcggttccatttttttgctcaacctagtacaatcttaccaatttaaaaaagaccaccattactgaagtgcaccccaattgttagacacataactaacaattggaggtgcattttttaacttttttaaaaatcaaccaattatcaggattcaaattgtatgatttaatatgaatcttttctttttttgttggctttttaccatttttcaattaactcacctcccttcgatctgaaaccttacggttcatttcgtataacttagttttacttctgcgcattttttaacaatttcatgccctttcataattcgtgttgctaatagtactccgttcatgcttttcactctccttaagatttattgacttaatggatatatgtaagttaacttgcttttatctactcacaatctgattaaaatgcttttcaagaaactcttgcattctatcagctataaacaaccactttttccctctagactctgggtaataaacaaaaccaccgttattaatatccaatatttttttataacaaggtttgtaaagaatattttgtgttaaccaaccataactatatccagtagctttttttaaatccttcatttcccaccatgttttttcttttttcacttaaaatcctcctcataatattgagatactcgatattaatctataaaaaaaagatactcaattggtaatcctaacttttttttaataacttgcatctcataatccgaaaatgaaaatttccctttttccttcgcagagtatgcgtctctattgattcccaatgcaattgccatttctgcaatcgtgatatcacgtgccattctttctctttttaaaattcgtttaggttttaaatatttctttctaatttcttctttaacagtcattgtgtcacctccgaattatccgatgaccaaataatatcgcatatctcgatattattcaagctatacacaaaaataatattacgatgtacaatatttttattgtgtcacgcgttattttagagtatactatccttatcgtatcaatggatggaggtcacttgaaattgaaaaaaaatattctgggtccagcgatcaaatatttacgtaaatacagaagaatgactcaaaaagatttagaaaaagttactggttataaacaaagcaccatatctggtcatgaaaatagaaatagcacacttgatgagttagatatacaaaattatgcaaaggcattacaggtaagtccccaaagtttctttacgatagcagaaaagctggaaaaaggagaaagaattactgatgatgatgtatcagggattatcactataaacaaggatcaggaaacagaagatgatcctcatatggtaatcgcagctcacatggaagataatctaagcaaagaagaactacaagaggtaatggacttcattaattttgttaaaagtaaaagaaaataggagcatttatatgaacaagttggaaacacttatagcacaatatccagaaataactttcaactttaataatgagatgcctaatgggttaagtggactttgtgttggtagtgaaatatatatcaataataatcttaatcaaaccattgcagaaaagtacgtaacagttagtgaggaaatagctcactttgagaaaggcataggtaatataattaaacaggaaactattaccgaacgtcagcaagaattccaagcccgaaaaataggctgcctccgaattgttacaattgatgctttaatactatgctatgaaaaaggcatccaaacaccttgggatatagcagaagaacttgaagttacaacggcttgtgttatagatgcatttgaatatatccggatgacaaaaggagtatctttttatcataaaaattacttagttcatttcttaactgatacacatataaacattcaaaagttttagcgaattttattttgaatggaggagaaaaacttggcaagctttgaaaaaagagcaactggttggaggtatcgcgtttcttataaagatggagataaatacaaaacaaaaacccaaggtggattctcgaccaaaaaggaagcagcaattgcagcaagtgaattagaaaaaaaaataagtcgtggacataatttaaatgcagaagataaactattctccgagtatatgagagaatggtttgaagtatataaaaaaggaaaacatagtctatcgcatgagaaaaaccttttacaatctgtaaaattagtcgaagaacattttattggtgtccgtatgaaagacttaaatagagttttatatcaaaactttttaaatgaattatctaaaaaacgtgctaaaatgaccgtcaagaaaaaacataactgtgttaaagcatgtataaaatatgcaattgaagatggaattttgcatagagaccctacttacaaagctatcatacatggagagaatgaaacaaaatcagaagaattaaagtttatcaatcaagaagagatgaaaaacatagtggatgaattacgcgcaaatttgacaccacaatacatttcaagatatataattctttttgccatagccactggggcaagatttggtgaaataatggggatgacatgggactgtatagacttagaagaaagaacaattacaatcaataagacttgggattatcgtgataagaatgactttggtaacactaaaaattatcaatctgtacgtacaataacaattgatcaggaaacagtgagtatgttaaaagatttacaaaaacaccaaaaagaacatgctctgaaaacaggtttaaggaatactaaaaatttgtgctttattaataatcaaatggaagttataacaaataacgctgtaaacaaagttcttaaaaagatttgcgcaaggtgcaatgttaaaccaataacatgtcattcattacgccatacacatgcatctatactcttatacaatggcgttaatataaaatacatttcaagaagacttggccacaaagatattgtaattacactacaaacatattcacatgtcttagatgaaatggaacaaaaggaatctagaatcgttgatcaaactatgttgaatttgttccaatcagttatataaaacgtgcaaaaatcgtgcaaaaaaaattctaaacgtataagtttatttgaaatagatagttcctacaaaattatataagtccagttatatcaaggttttaagaaaaaacatgtgattatttaaaaatctaaaagcgcgcccagagggattcgaacccccggcagacgtggtaccggaaaccaccgctctatccgactgagctatgggcgcatgattatagaaaacacttcattttcttctcataataatagcaataaaatccatctaaatcaataaaaatatccccgtaataccttatgcatcttagctaaaagcatataaaatccattccacccctaaattttccaatcataaattctccccaactcacaaattataatctttgaattgatattccaaagggggcttcattcaatgactgtaattacaaaattaaagcagactgtttctggattaaaaagtgcacaagctagcttagagggattcgctcttgatacggataaccaacaagctaagcaacttttccaaacagctgcgcagcaaacacaaacgattatcgattctttaaacccacgtgttgaagaagtccaacaagaagaaccacaatactcacagcaataacgaatcagtcttgctgtgaaatagaaaaaggatgatatgcagtcatcctttttctatcacattacatattgcaatagaaatggaatgatgattatgcgaaagattggacttataaccgcgttatttatacttctatttagttcttttaccggttgtgatcatagcccattagataaaaaggtaaagaaagaagaaacaaaacgaacagaaaaagaaaagggtccaaaattaacaaagatgagtacagaatcctttaatcaatctatatcgcaaggagctaagaaaaaggccctcgctatggatgaaattataaaaagcgcagcagtgaattcaaatttagatctctacatagcggttatacctgagcatcatgaaaggtttggattaaaacctttgcgcaagaaacttcaaaagcaactaagtgatgaatatcctactttcgatgttcgtgttagtacagataaaaaaatctttatgttactcgaaaagcttgcaaacaaaattaagaaaaaagaagtatctaaagatgagatcaaaaaacagttaaagctaatcggatcagaaatggaatctaacacttaacgctttcgaatagaaaaggaaggattgcaatgtcaagtaaagataaaaacttaacccctgtacaacaggaatacaaaaaatttgagcaagaacgcgaaccgaaacgccctgttctaaaaaattgtttaaaggcctttttcgttggtggttttatctgcctaatcgggcaactgatatcaactttttatattacgtatttcgattttaccgaacgctcagcaggaaatccaacagtcgcaactctcatttttatctcaatgttgctaaccggattcggtgtatacgatcgtctcggtcagtttgcaggcgctggaacagctgtacctgtcactggatttggtaactctgttatctccgcgtgtattgaacaccgaacggaaggttttgtactcggtgtcggcggtaatatgtttaaactagctggttctgttattttatttggtgtattttccgctttcgtcatcgcacttattaaaactattctcgttcaatggggagggctataaatgttacaaggacaccgaacgtgggtatttgaaaacaaaccagtcattatttcaacaggggttgtcggtggaccatttgaagcaaaggggaacatcccagaagacttcgatatccttcatgaagatttatggctcggacaagattcctatgaaaaagcacataaaattttattcgaagaggcttgtagtcgcgctactgaaaaagcagaacttcgtaaagatgatattcagttcgtactcgcaggagatttaattaatcaaattacccctacaagctttgcttgccgcacactgggcactccttatctcggattattcggggcttgttctacttctatggaaggtttagcacttggggcaagtatcgtaaatgcaaaaggtgcaaaatatttattaactggagcttcaagccataatacagctgtagaaaaacagttccgctaccctaccgaatacggtggacaaaagccgcctactgcacagtggacagtaaccggagcaggagccgctatattaagcgatactggacacggtccaagagtaacctctgcaacaatcggccgagtggttgatatgggattaacggatccgtttaatatgggaggcgcaatggctccagctgcagttgatacaattgaagcccatttacgtgaacgtcaaattgatgcctcttactacgatttaatcgtaacaggcgatctcggacatgtaggacgcgaaattgcttatgacttactacataaacacggaacgaaagtaacgagcgaacaatttcaagattgcggaattatcatttatagagaaggacaacctgtcatagctggtgctagcggacctggatgttctgcaacagtcgtgtacggtcatttattaaaccgaatgaaaagaggagagttcaaaaaaatacttgtcgttgcgacaggcgctttactatctccacttacattccaacaagaagaaacgattccgtgtatcgctcacgccgtttcgattgaatttggaggtgcaacgcaatgatttttttctgggctttcgtcattggcggactcatatgtgtaatcggccaacttatgtttgatgtcggcaaactaacacctgctcatacaatggcaacactcgttgttgctggagctatattagatggatttaatttgtatgagccattaattgatttcgctggagccggggcaactgtacctattacaagctttggtaatgccctcgttcatggcgcaatggaagaagctgcaaaacatggcatcgttggcgttattaccggcatgtttaaagtaacgagcgccggtgtatcagcggctattattttcggcttcattggagcattgttattcaaaccgaaaggataagaggtgtttatatgactgttatcgctagcgtaaaaacttgccttgctagtgtaaggggcgctcaagcaagtttaagctccctttcattaaattcacaagacgaagaatcaaaacgcgtatttcatgaatgtatgttagaaatggacagcgtcatcgctgatttaaaggatagaatttcagtattagaacgtgaagaacctcaatataaagggttttaagtagactggaggaaacgactatgtctcacctgccggaatggacacttgtcattcttcgctctgtattcatattaattattttattcgctattacgaaatggttagggaaaagacaaatctctcagctttccttttttgaatacatagccggaatgacgattggtgacatcgctgcccaagtatctacagggctcgattcaaaattttttcacggcgtctttgcgatactcattttcgctgtggtaccttttttaacaggaatcctctctttaaagaacaaaacagctcgggacttctttgaagggaaatctaccgtattaataaaagacggaaagatactcgaagataacttaaagaaagaaaaatatacgagtgacgaattactggaacttctccgtggaaaaagtgcgttcagcgtagctgaagtcgaatttgctgtcttagaaccgagcggagaattaaatgtattattaaagaaagattcccagccacttacagcaaaagacatcggtttaaaagtaccaaacgagaaagaaccacaaactgttattatggatggaaatgtactagatgaacctctttcagcaagcggacataaccgcgcttggctacattcagaattagaaaaactcggtgttgttattgaaaatgtcttcctcggtcaagtggattcatacggacaacttactatcgacatttacaatgacaaactccaaatgccttctcctcaaaacaaacctttattattagcatctttaaaaaaatgtcatgctgatcttgaactattttccttagaaacaaagtcgaaatcagcaagtgaaatgtatagtaaaaacgcgaaacaaatcgaaaagattttaaataaagtaacctatcttttaaaagactaattatcgaaagaacgcttcagttaaaaggcgttcttttcttttttctccagttttcataacgtttaaatttatgtaattcggttatgatgttgaagatacataagcagggaatttcgaaaacatagcgaatatttcatggtacaactacatatttttttgatttaaagtggtttcgtttgacctttattgaccataattgtattataagactaagaaagctttataaggaggaaataacagatgaatttaattcctacagtaattgaacaaacaaatcgtggagaacgcgcttacgatatttactctcgactattaaaagaccgcatcattatgcttggtagtgcaattgatgacaacgtagctaactcaatcgtttcccagcttttattcttggaatctcaagatccagaaaaagatattcacatctacatcaacagccctggtggttctatcacagcaggtatggcaatctatgatacaatgcagtttattaaaccacaagtatcaacaatctgtatcggtatggcagcatctatgggtgcattcttacttgcagcaggtgaaaaaggaaaacgttatgcacttccaaacagtgaagtaatgattcaccaaccacttggcggagcacaaggtcaagcgactgaaatcgaaatcgctgcaaaacgtatcctattcttacgtgaaaaactaaaccaaattcttgctgaccgcactggtcaaccacttgaagtactacaacgcgacacagaccgcgacaacttcatgacagcagaaaaagctttagaatacggtttaatcgataaaatctttacaaatcgttaataactaaaagcgaaagcggctcgtttagaatcgcaggtcgctggagctggatacaactaaaagtggaagcgccctataattgggcgcttcttttatatattgttccccgctcacataccccatccagtatctctctaaatatatcagcgatttttcaaatatatcgaccgcaactccgattatatcggcgattattttaatatatcgacgtttcgacataacttatcgacttaccgacaattctcgacaagcacgtaccccttaaatacccctcctcgctaattcgcacagacaacaaaaaagctatcgcatatacgcgatagctttttattgtacatatgcagctaatgcttctaaagcctcttctgcatctgaaccttctgttgtaattgttatcatgcttccagttccaattgctaagctcataatccccattatgctctttgcatttactgtctttccatctttctcgatgaagatatctgcatgaaagcgatttgcctcttgtacaaacaacgcagccggacgtgcttgtaaaccgttttttaatgaaacttgaactcttttttgaaccacagctccatttcccctttaacctcttatttttttgctaccgtttcccccgcgcgtaatttctctgcaatttcatcgattttacgcaaacgatgattaatacccgacttactaatcttccccccggataccatctcacctaactctttcaatgttacatcttgataatctcttcgtaattgtgcaatctcttgtagtttatccggcaatatatcaagaccaactgtctcatcaatgtagcgtatattttcaatctgccttagtgctgcaccaattgttttatttaaattagctgtttcgcagttcactaaacgatttacagaattacgcatatcacgtacgattcgaatatcttcaaatcttaaaagtgcattatgagcacctataatatttaaaaactctgtaattttttctgcttctttcaaatacgtaatgtacccttttcttctctccagcgtcttactatttaaatcaaatccgttcatcagttcacatatagcatcattatgttccttatataacgaaaagatttctaaatgataagatgatgtttctgggttatttactgaaccacctgctaaaaatgctccgcgtaaatacgatcgtttacaacacttcttctcaatcaattcttgtgatatatttcgaataaatgaaaagtcatctcgaacaatatgaagatcagctaatatttcgcgagacttctcaacaagccgcacaatatatacattatttttcttcaatcgcatttttttacgaacaagtaattctaccgtcacgtcatatccttttttcaaaagcgtataaatccttcttgcaattgccgcattttccgtttgaatatcgatagatagacgacggtttgaaaaagaaagcgacccgttcattcgaagtagcgctgataattctgctttctcacagcattccttcatctcaagattcgtcaactctttctttgtttctgatgcaaatgacacagtcaacacctccttatacgattattgcggaacaaaattcttgtcctatatgaatgaggagcgctacctcaaacgaggcaacgcatatttataacaatgaatataaaatcgaagctaactttaacgtatcatgccttacaacatgatcatcatacttcgctaatccctcttgaataacatcaatattattttcaacaaaacgttcttcatccactacaactggtgtagacatttcttcatcatataacttacgtaattcacaaggaatctcacggttatttacaattgcagtattgataaatggttgccctaaatgatcgtgtaacgcctgcacatgatcaaaagcagtatatcccatcgtttcacccgcttgtgtcataacgttacatacatataccttcttcgcctttgcagcaagaactgcgtctccaattttgttaacaactaaattgggtaatatactcgtatacaaacttcctgggccgaaaacaagtaaatcagctcgtttaatctcagccaacgtttcatgcaatggctctacatcttctggagttaaaaagacgcgattaatcttctttccgtaataaggaatctttgattcacctgttacaatttctccatcttcaagttccgcatgaagtaccgcactttgattcgctgctggtaatacacgtcctctgacatttaatactttacttgtttccgtaattgcatggaaaaagtctcctgtaatcgaggtcatacctgccaataatagatttcctaacgcatgacctttcagtccgtctcctgttgtgaaacggtgctgaaataaagcttccaccagtggctctacatccgataacgcaacaagtacgttacggatgtcacctggaggtggaatttctaactcatcacgtaatcgacccgaactgccaccatcatcagcgattgtaacaactgctgtaatatcaacaggatattgctttaatcctcttaataaaactgagagtccagttccgcctcccatgatgacaattttaggttttctctcttttttcatcccttaatggccctttctcttctccacatcacgatgagatacatgaacactatactctggtttcaaatgtttcccaaggtattctgtaagcgtaacagaacgatgctgtccacctgtacatccaattgcaattacaagttgacttttgccttctcttttataatgaggcagcatgaaagtaatcagatccgtcaacttctctaaaaacttatgtgtctcattaaatttcagtacatacgaagaaacttcttcatctagtcctgttaatggcttcatgtgtggaatgtaatatggatttggtaaaaaacgaacatcaaatactaaatctgcatcaattggaataccgtacttaaatccaaatgacataacatttacacgaaatgcttgctcagtttctgttgagaacaagtgaacaattttttcacgtaattctttcggttttaaatccgatgtatcaagcacaatattcgctcgtgccttcatatctgttaataaattgcgctctgcttcgattccctttaacggcaaaccagttggtgcaagtggatgcgaacgtctcgtttctttataacgagttacaagcgtactatctttcgcatctaaaaataaaatatgaggaataatccatgtacgttctgataaatcatcaagtgctccccataaatgttcgaaaaactctcggccacgtaaatcaataccaagtgccactttattcattttcccttttgaatccgccataagctcaataaactttggcaataacatcggtggtaaattatctacacaaaaatatcctaaatcttcaaaactttgtaaagctactgtttttccagctccagacatccctgtaataattaccatttttatatcattattctctgtcatcgtatcctctccttgacggtttaactcggatctaatcgatatgaaagcaactcaaaatctggggtatatacaaatgtaccgtagattatgccatttcctttaattaaataatcaataatgtgataatctcctggcgccattgctaaatcatcaattttatcaaatgtatgccaaccaatgatgccttcttcgctctctagtttgttttctcctgcaaaatctgtcgctaaaaaggagaacatcatccattcagaaacaactttatcaccttcttggatgacaaaggtgaagaccccctttaacgctgggtttttcaaataaatacctgtttcttcgcgatattcgcgaacaacggaatctcttacagtctcaccacgctccattttcccgcctggtgcaacccaccaattccggcgaggtttttggagtaagagtacttcattatctctaattaacacacagtttgtcactctttgcatgtttcttcacctcagctacttgcagtaaaattcctcactgcatacttctttcattatactatcaaaaacagtttgctacaacgaaggagccagtcctctttcgctaagcatatgctactcagcaattttaaaaaagctttctataacaagcaatgtaaatgcttagacttttaatgaatagcatgaaaaatccccttaacgctttttatcgccaaggggattaaagtacttatttcttaccgaaataagtaacaatcgcaaatcctaaaataaaggtaatgattgaacttataattgaaaatccaccagtcggaatcccagggaatacaattacaatcgaaccgattacaagtccaataattgccgcaaatgtcatacttttataacgatctaataaaaaactaatgcctttactacttacaacaaatccaaccataacaccagcaccgataaccacgattaaaggtaagttaagtgtagttaaagcgttaattgctgttggatacacaccaataattaataaaataaacgatccactaatcccaggaagcagcattgccatactagccatccatcctgcgaaaaataaaccaattgcatttacaattgttaaagtcgtaattggatctgctgccttatctggtttaaagaaagctgtaatcgcaacaagaattgctgcaactattaataaaacgatgtgcttacctttaaacgacgactttgcatcagcttccctcattaacatcggtaatatactaataattaaaccgaggaagaaaaattgagtcggttcataatgatttgcaagtaaatatttaataacgtgacttaacgttaaaaatgccgctgccacaccagctgcaaggggaattaaaaatcctaaatgttttttccattcacgactaaagaatccactaattgccgcaagcaattgttcataaatccctaacacaacagcgattgtaccgccgctcacaccaggaattaaatcactaacgcccatacaaaatccacgatatatattacgccattccatactgaataaattcctcatttcttatagtgattttttccgtaaagtccagtatatcaataagaaagcttataatccttatattttttgacaaaactttgacattttcacacaaaaaaagaagaaagctcctgtcggtagctttcttctcacaaggtatattatcccttatttttctgatacagtttttaattcctctaataattcttctacgtaatgttgtgcactttgcgctgcaatactaccgtcacctgttgcagttacaatttgacgaagcattttttcacgaacatcaccagctgcgaaaataccagggattttcgtttccatacgctcgttcgtttcaaggtaaccattttcatttgtaatacctagttcaacaaatggttttgataaaggtaacataccgatgtatacaaatacgccgtcagttttgacttctttctcttctccactatttacgtccacaagtgttacacttcctactttaccacttgcttcgttgatttcttttatagtgtgattccaaatgaaatctactttttcgttttggaaagcacggtcttgtaaaattttctgtgcacgaagcgtgtcacgacggtgaacgatcgttacttttgatgcgaagcgtgttaagaacacaccctcttcaacagcagaatctccgccaccaattacgataagctcttttcctttaaagaatgctccgtcacatactgcacaatatgatacaccgcggccgccaagttctgtttcacccggtacaccaatttttttatactctgcaccgcttgcaacgataattgcacgtgctttatattcttttttaccagcaataattgttttgtattctttaccatcgatgacttttttcacatcaccgtatgcatattcagcaccaaatttcttcgcatgctcaaacattttatttgataaatctggtcctaaaatagactcataacctgggtagttttctacatcttccgtgtttgccatttggccacctggaatacctcgctcaagcattaatgtgcttaaatttgcacgagatgtatatactgcagctgtcataccagctggtcctgcaccaataataacgacatcataaattttttcttctgacacactattcactcctatccattcttacacaattaagttaccctcattatactgttagcatcatttttttcccaatgatttgcttatcttatgtgtgcgtacgcttaacagcttgcacatactttcggacagtcgctacagatacattatatacatctccaagctccgactgtgtcattttatttccttgttcgccgcgtacaatgtattcaatcgcagctgaccagccgtacacatttgtaaatatgtctccagatgtatataaacgtatgaacgtacaaaaccaaaagtgtaaacactcttcgattaattcatcatcttttttcgtataattgtataatgcatccgcaattctcgcgcactgctcaaattgctgtaaatcagctggaatactcttatgactattaagtaaaaagaagtactttgcaagttgcgatacgatgggaacaccgttcttcgcttgcgttatatcaaagaagaatccaaccttctccggcgttgacaattcattcattaaatataaagctagcatttgttcttctagcgtcgcactttgctgaaatgattttcgtaattcttcaaataacacattttgcccttcatctgctaaattcagcgcattccacggttcttttccctttttatcaggatgtaattccacgacatattgccacattttttcagctagttgctggtctttcaccatatacgcagaatatgcaaaccaataataaaaactaacgtctccctcatatccttgacgctttaatagtttgaaccacttatatgcatgctcgaaataaccaattgttgcgagtgtagttcccagtttcaaacgatgttcaaatgaaatcggatataccgaaactagctgtcccgctaatgcctctacttgtttatgctctccaattgaatatagaaaaataagcgtattacaaagcgcatgtatattgccaggatttttctctaaaatcatttctgttaacttcagtgctttgtctacattaccagattgaaaatgtgcaatggctaaattattatgacctgaccaaaattccggataatctttcgtaacaatttctaatgtagcaattgcttcttccaattgtccattacgaatatagcgattcgcttcttcctgcataacaattaaatcatcttcatcttcaatctcttccgcacccattgcttcttcttccataatctcaagaagttctaacgtatcttctacgaattccttctcttttgcaacttctaaataacgatctgcatatttcttcgcctgttgaaataaccccatatatgcataattatttgcaataaaataatagcactgttcaagttctggattagatctaactaactttaagaagatttgattcgattcttgatattcaccagcctcagataatactgatgctaattgacataaaataaacggctccttctcactttgtgccgctcttcgaaaatatttaattgcatcttgcaatttttgtcctttgtaagctctcatcccttttttataaaagaagtccgctaattgattaaaagagataacttgtccgttctccttatatatcctttgatttttccccatatatcctccagttttttgttttcttcgttcacacattcttctatctataagtataaacgattccgtaaaaaacaaaacagtatattatactcaattatttcctttttattcataaaaaaagaggagaaatgttacattttcaccatgaaccttctcttgcggtcatttgctctttcgtataaataatacgcattggatttccacctacgaaagcaccgctcggtacatctctatgaacaagtgtgccagctgagacagtcgcaccgtctccaatgttcacacctggtaatattgttacattcgctccaatcattacttcatttccaatgacgatttcgccaagtcgatattcacgaattaaatattcatgtgctaaaagcgttgtgttatagccaataatcgaattctctcccacagttatcttttctgggaacataatatccggcattaccataagcgcaaatgatgttttctttcctactttcatccgtaaaaaagtgcggtacaaccaattttttacggataaaaatggcgtgtaacgcgcaatttggataataataaagtttttcattaccttccaaaaagacactgttttatacacattccataacgaattttctcctgaaacaggatagcgcgttgtccgtcgcacttagctcgctcctctactaacttacttgaacctttatgaacggttcatgttagacaaaatcggtagcaaatcactcattttatctagcataaagtccggcttgtaagcctctaaatacgctctacctttcaacgtccatgaaaccgcagctgttttcgtccccgcattttgaccaccgacaatatcatgatgattatccccaaccatcaatgcctcttctggttttgcatctaataattcaagcgctttttgaagtggctccggatgtggtttcacatgctctacatcatcaattgtcacgacaacatcaaaaaattcatcaagctttgacaactgtaatcccatctcaacggtttgtctcgctttcgttgtaacaataccaactttataaccttgcttcttcaactctcgaactgtttcatatacagtttcatattcttctactaattcatcatgatgatcatggttaaatttccgatagctagtaatcatctcttcaaccttactttcatcaatcttgctgaaagtatcatgcaaagatggaccgataaatggcaacacatcttcacgcttatattgatttggataatatgtatttaaagtatgtaaaaacgaagaaataataagttcatttgtattaattaaagttccatctaaatcaaataacacggtatttattctcatcgccttagtcctttcgccttcctgaatatgaaagaagcagcatcttataataagatgctacttgtctctaattttctaaatatcttttatcagcttgccccatttttcgtctcacaataatgaaaataatagaaataacaacaagtccaattgacattacttgtgcaatacgaagtggtcctagcattaaactatctgtacgtaagccttctacgaagaagcgtcctactgaataccaaattaaatatgtgaagaataactccccgcgacgtaaattcacttttcttaatgcaagtagtaaaattacgcctgcaaaattccataatgattcatataaaaacgtcggatgatagtacacaccctcaatatacatttgattaataatgaaatccggtaaatgaagaccttctaaaaactgtctcgttacttcatcaccatgcgcctcttggttcataaagtttccccatcggccaattgcttgtcctagtaaaatacttggtgcagcaatatcagccagcttccagaaggaaaccccgcgtcgtttcgcaaaaagaacacctgtaataacagccccgattaaaccaccgtgaatcgccaaaccaccttgacgaatattaataatttgactcggattttgtgcgtaatattcccattcaaaaataacatagtacattctcgcaaaaagaatagcgatcggtactgcaattaatacaaggtcaacaaatgtatcttttggaatacctagcctttctccctcgcgagttgccagccaaagacctaatagtacacctgtaccgataataatcccgtaccaatacacaggaaacggcccaagttggatagctacacggtcaagctgtggtacagaagctaacagcatatgtatatgacctccctctccaaagtttactcctgatttcctaactcaattgcactcattaatcgttcagagaactgctgtgctgcattgactcccatacgtttcaaacggaagttcatcgctgctacttcaataataacagccaagtttcgaccaggacgaactggaagtgtaatcttcgtaagttctgtatcaataattttcatcttctcttcatcaagacctaagcgatcgtaatttttcttttgatcccaaatttcaagattaataacaagtgtaatacgcttataatttcgtactgcccctgcaccgaataacgtcataacgttaataatacctagaccacgaatttctaataaatgctcgattaaatctggtgaacttccgactaacatgtcttcatcttcttgacgaatttccacactatcatccgcaacaagacggtgaccacgctttacaagctcaagagctgtctcacttttaccaacaccactttgacctgtaattaaaacaccaacgccgtaaatatctactaacacaccatgcacagctgttgttggtgctaacttaccttctaaatagtttgttaaacgacttgataatctcgttgtcgtttgagaagaacgtaataaaggcatacctgattcacgtgatgcttgtaataactcatctggtacatcttgattacgagttacaataatacatggcgtctcctcagtacaaagcgctttcattctctcttgtttttgctctgacgttaacgtgtcaaagaaagtaagctccgttttaccaagaagctgcacacgatctgctggatagtatgtaaaaaatcctgccatttcaattccaggtcgtgataaatcacttgtatcaatcggacgatgaatgccttcttcaccactgattaactccaattgaaattgttcaattaaatcttttgttcttactttcggcatatgtataaacctccactccgctgcgggttcagtctcgtttgatgtaaaattccattctatcggatattgtaccatttttttctgaaaacaagaaatacggtttctaataaatagaaaaaaacatttcatacgaataatgaaatgtttttctttttgtcactttctctttttttcatatagaggctcaacaattgccttttcaattatcatattaaaaattgaaatacaaattgccgcaacaatcgctacaccaaatcctgatatattaaaagcatctcctaataatgaatctgctatttttaacgtaatcgcattaataacaattaagaagaagccgaaagttacaacagtaattggtagcgtaattaaaattaaaaatggctttacgaacacatttaaaaccgccaatataatactcgcaataattgcagtttgtatatttgctacgtaaaatgcatctggtgcaatcccttttaaaagtcccgatacagcgattaacacaacgctatttacaagaagtgatacaatccatctcatttcgttacacatccttttaaacatatatatttcatcatacgctaatagataagaaacgcaagtatgatacgaacacttatatcaacttattctatctttcatgcttgtatacctactaacatttcttagtaaaataagggccgcaccatctatgttcatgagtttttacaaaagtccaagtgaactccttatctacaatatagatatcacccttatacatatcgtccctctcacacaatatatcatccatatgtaacaaactcgcatcctttattaacagtacctcatcacagtgttggtagaaaatgtagcaatcctttttcacttcattatgaaacgcgttctttgcttctttaccctctaaacgcttctttttctcataactaaatatgtgccaaagatacccacatccatacttatctccataaagaaaaatgtcttctttttcttcatcacttaaatgatttgcaaagtgatcctcccagcgctttcgaaaatatacaccccaattttgaaactctcttaccttcatatttttcttccttaacacctctaaaaacttcatcttctccccctatacaataaaaaccgagcgtcatttccacccggttttcatcaataaacttattgcgataattctacttcttttattttctctttcattcttgctttatcacgatttaaaatctcttttaaatatttacctgtgtacgagcgctcttctttcactacttgctctggcgttccggaagcaacgatttgtccacctttatctccaccctctggtccaaggtcaacgatataatcagccgttttaattacatctaaattatgttcaattacaagtaccgtctcaccgctctcaacaagacgttgcaacacttctagaagacgtgcaatatcatgcgcatgcaaaccagtcgttggttcatctaaaatgtataacgtacgtcctgtagaacgacggtgtaattcagaagctaatttcacacgctgtgcttccccaccagataatgttgttgctggttgacctaatttcatataaccaagcccaacgtctacaagcgtttgaagtttacgcttaatttttgggatattagcgaagaactctactccatcttcaattgtcatccctaacacttcagaaatattcttatctttatatttcacttctaacgtttcacggttgtaacgtttaccatgacaaacttcacacggaacatacacatctggtaggaaatgcatttcgattttaataattccatcaccacggcacgcttcacaacggccaccttttacgttaaagctgaaacgtcctttttgatatccgcgcactttcgcttcattcgtttgtgcaaacacatcacgaatatcatcgaatacacctgtatacgtcgctggattagaacgtggtgtacgaccgattggtgattgatcaatatcaattactttatctaaatgttcaagacctttaatctctttatgagtacctggcttcgctttcgctttatataacttttgagctagcgatttatatagtacttcattaatcatcgtacttttaccagaaccagatacccctgttaccgctacaaacgtaccaagcgggaatgacattttcgcattctttaagttattctcttttgcgccgacaatctctactttacgtccatcacctttacgtctttcaagtggaactggaataaactctttaccgcttaaatacttccctgttaatgaattatcatcttgcatcacttcagccggcgtccctgctgaaacgacctgtccaccgtgaatacctgcaccaggccctatatcaagtaaatagtcagcagccatcatcgtatcttcatcatgttcaacaacaattaacgtattacctaaatcgcgcatttcttgcaatgtacgaataagacgatcgttatcacgctggtgtaaaccaattgaaggttcatcaagaatataaagtacgccagttagacgagaaccaatttgcgtcgctaaacgaatacgctgcgcctcaccacctgataaagttcctgcggcacgacttaacgttaaataatctaaaccaacgttcactaagaacccaacgcgctcctgaatttctcttaaaattaaatgagctattttttgttgcttctccgttagctctacattcgagaagaattcttgtacttcttgaactgaatacttcgttacgtcagcaatcgttttattgccaacaaatacagctaagctctcaggctttaagcgtccacctttacacttcggacaagcttgttctgccatatacttttccatttgctcacgaatgtaatcggagctcgtttcacgataacgacgttcaatgtttggaataacaccttcaaataaaatctcattttcctttacttgaccaaattcatttacatagcggaaataaaccttctcttccccgcttccgtacaacactttatcaaataaatctttcggtatatttttcacaggcacatccatatcaacgccgtagtgattacatacagattgtaaaagttgcgggtaatattgtgaacttgtcggttcccaaggtgcaattgcatgttcatttaatgataaatcccagttcgggataacaagctctaaatctacctctagctttgaaccaagtccatcacaagaaggacatgctccgaacggactgttgaatgagaacatacgcggctctaattctccgattgaaaaaccacaatgcggacaagcatgatgttcactaaatagaagttcctcttctcccattacatcaattaacactcggcctccgccaagctttaatgcactttcaagtgaatcagcaagacggcttgcgattccttcttttacaacaatacggtcaattacaacttcaatggaatgcttcttatttttatctaacgtaatatcttcagatacatcaagcatttcaccatcaacacgtacacgaacatatccttgcttcttaatatcttcaagtactttcacatgtgcacctttacgcccagacacgataggagctaacacttgtaatttcgtacgttcaggatattcaagaacacggtctaccatctgctctactgtttgtgatgtaatttcaatcccatgatttggacaaattggcgtaccaattcgcgcaaataataaacgtaaataatcataaatctccgttaccgttccgacagttgaacgtggattacgactcgtcgttttttgatcgattgaaatcgctggtgacaatccttcaatcgtgtcaacatccggcttatccatttgtcctaaaaactggcgcgcatacgcagataatgattctacgtatctgcgctgcccttctgcataaatcgtatcaaatgctaatgatgatttccccgaaccagacaatcccgttacaacgacaagctgatttctcggaatggttacatcaatattttttaagttatgtgctctagcaccttttacaacgataaaatccttgctcttactcacttttttcacccttccgcttttaattctaatagtaaatctcttagttcagctgcacgctcgaagtctaacgcttttgctgcttctttcatctctgcttccatcttcgcaattgtcttttcgcgctcttttttcgtcattttcttagaaggagttgcttcgtatgtttctgcctcttcagcagctgtcgttgcacggataacatcacgaacgcctttttgaatcgttttcggcgtaataccatgctcttcattgtaagcttcttgtatactacgacgacgcttcgtttcttcaatcgcaattcccatagatttcgttatacgatctgcatacataataacgcggccgttttcattacgcgcggcacgaccaattgtttgaattaatgaacgttctgaacgcaaaaatccttccttatcagcatctaaaatagcgacaagtgatacttccggaatatctaatccttctcgcaataagttaatgccgacaagtacatcaaatttaccgaggcgaagatcacggataatttcaatacgttctaacgttttaatttcagagtgaagatagttaactttaattcctacatcttttaagtaatccgttaaatcctctgacattttcttcgttaaagtcgtaattaatacacgttcattttttgcaatacgatcttgaatctctcctaataaatcgtcaatttgcccttcaattggtcgtatatcaattggtggatctaaaagccctgttggacgaataatttgttctattacttctggtgactgctctaactcgtacggtcctggcgttgctgaaacgtaaataacttgattcgttttctcctcaaactcatcaaacatgagcggtctattatctaaagctgatggcagacggaatccatgatccacaagcacttgtttacgtgcttggtcaccgttatacatcgctcttacttgtggtactgatacgtgcgactcatccataacgattaagaaatctttcggaaaatagtctaataacgtatacggcgttgcccccgctggacgaagtgttaaatgacgggagtagttttcaatacctgaacaaaagcccatctcgcgcatcatttctaaatcataacgtgtacgttgctctatacgctgcgcttctaacaacttaccgttatcatttaactcctttaaacgttcttctaattctttttcgatattttcaatagcgaccttcattttctcttcacgtgtaacgaagtgagatgctgggaagattgctacatgatcacgttctgctaatacttcacctgttaacgcatttacttcacgaatacgatcgatttcatcaccgaaaaactcaattcgaatacaatgctcatcaagtgatgctgggaagatttcaactacatctccgcgtacacggaatgtaccacgcttgaaatcaatatcattacgtccatactgtacatcaacaagttcacgaagcaattgattacggtctttttccataccaactcgaagcgaaacaactagctcgcggtattcttctggagaacctaagccatatatacacgaaacactcgcaacgataattacatcgtcccgttcaaataatgcagacgttgccgagtgacgcaatttatcaatttcatcattaatctgcgcatctttttcaataaacgtatctgtttgtggtacatacgcttctggctgataataatcgtagtaactaacaaaatattcaactgcattattcgggaaaaagtctttcaactcactatataactgccctgctaacgttttattatgagccataacaagtgttggcttttgcacttctttaatgacatttgaaatcgtaaatgtcttacccgttcctgtcgctccaagcaacacttgctttttctttccactattaattccctctacaagcttctctatagctaccggctgatcaccttgcggggaatacgctgagacaatttcaaattgacgttccaagaaaatccgacctcctcataaaaatctgtattattattttaccacgaatacctataaaaaacctaaaaaaacgaacagatattcggtaaagttttcgacaatatacacatagaaaaaggaaggagtaaatacttccttcctctactaattctattttttaggtacatatactaagtcatatccattgcgcccagcttcattcatacaatctattaaccgataagtacttcctgattcgcgctgctctttaacaatacctttacaactatctttatgtaaccctttatccttcccagcaaatttgtcttttctattatctgacacataaaatatatcgttcccactatactctaacgtttgaaaaatcgggtccccttcaagggtatactgtacaattcttattttatcaacttccctttgctcgacattcaaaacgaacttttcaaatttatctagattgagaattcctgctccctttacaatgacatcattcttcttatcaattgtagtgctagatggtgaacatgctactaaactaaagagaaatagacttataaaactggttctttttcctattgtcatcctctcctataaaaattatttgtataccagaaaagctactttcaattatgaaagtagcttttcttttcctttctccttcttcggaaaaatcacatatgaaaatgaaatcgctgtatcaactaaaaatataatcgcccacacttgactcacgcgacttgcagctttatttaaaacgattcccgattctaaccaattaccccattgttcaaatggaataaatccatacgcgaagaaaaaaaatatgtgcacaccaacgaataaaacaagatgtaatacccaattttttatttcctgctttgcataggccatacctgttaattctacctgttcttcaataataggcgccggttcattacgccatttcgcaactgatttttgtacaaatatatcaagcttctttaaatcctttttcccgtagaaaactgcatataataaaatgattacagtaataatctgaaagttagagaactttcctgtttgataatagtccactacccctaaagttaaaataaatacttcatttacgaggagtacaatccccataataaaactcgcccttttcaaacggaatccgtagcgaagtaaaaagaaaccgatagctgataaccaaaatacaatttctgccccaattaaaaaataccaacgatattctgcgagtatactcatttatccttctccctttcatcataaatacgaaaagcctcatccatatatgctaaaagttcttcttcaattggatacatgctcattttctgtgaatcttccttcgattttctaacttcccataacttatctaaaaacgcttcgtcaccattagccatttctaaacatttctgcattaatttcttcgttgcctcttgtacttcatcacttgcgacttctttaccgtctttcataaaagtacgtaattgctttaataaatctacccattctaaaacattcggatcttcctcactcatatttggcaaattctgaagcaatttttgttcttcctttgaaaatacttcattttgaaatatttcacgtatacgaggggactgttttgaaagctgaataagttcaaacataactttccaatcaagttctccctctacatctaccgaataaacaactgcttgtaaaacacgctccattcgattaaatttcttttgttcttcctgtacaaaccgaagttgtttttcaagcgaattttttaaatccagctcaccttttactaacatattcgcagcttcttttaatgaaaatcccatttctttcaaaaataaaatttgttgcaaacgaataacgtcattttcactatataaccgatgtccaccctctgtttttccgctcggctttaataaatctatttgatcataataacgtagtgtacgtactgtaacccctgtttctttcgtcaattcttgtattgaaatcactaccatcacctcttccctctcattataaaagatgacgttacgtaactttcaagcgttttgtaaaaaaaatacaaaaagctgtttatacaaagtgtataaacagcttttatggaaataaccccttttgtatggcgcgcccacaaaataaaataagtgctccaacgacaacactcgttgccgttttatgataatgggctaataataataaataatacgataaacctacagtaccaatcataatacaaatgctcggcactggattacgagaaaagttttgcattccccaaagaagcgaaaatatagctgtagcgacacataacaccggtaatcccatcccagttcccctttttctatctattattccttgttgctaacacgctcgttgatgcgatactaattaataaatcaaaaccaatccttatatatttaaacgtttactctaattgaaatctctcaagcttatcatttattttctttctccttactccagcgtaaatatttcctccaccttcactccaaaatacttggcgatttttaaagataactctagactcggattgtaatgatggttttcaatcgccactatcgtctgccgcgtcacttgcatcgcctttgccatttcaacttgcgttatatgattttgctttcttaactcttttattttatttttcacacccataggctccaccttcaaaagtaaagatatctttacttaaattataaatattttccagttataagtaaagatacctttacaaattttagaaaaacgtttcactgaacacctactctaataaagtacaagagtaattcaatttatatcagcgcaacttaaattatatcggcgatttcccaaatatatcagcgcaactccatttatatcggcgattttttaaatatatcgacttaccgacaaatatcgacatccgtagcgctactataatcataagaaaaagctgtccccaaataccttcgggaacagctttctcctctactacataaatcctagcgcatatacaagaacgtatccaagaaccgataagcaaaccgagccaatcagccccgccacgaacgctttgcttcctaacttacggaacgttttaaactctacatttaaaccaagtcctgccatcgccattgcgattagcatataagcaatgacaacaatgtatcccgcaactacttctggaataatcccgagcgaatgcactgcactcatcgctaaaaatccgaaaatgaaccatggaattggaaggtcgcgccacgatcttttttccttgcttccttcactctttccaaaccataatccaattaaaattgctactggtacgagcattgcaacgcgcgttagcttcacgataactgcgatgtctatagccgtacttcctcctggcgccgcggctgcgataacatgagcaatttcatgcagcgtggcccctgagaatacaccgtaaccatatggagataggccaagcactggatataacaacgtataaataagcgtaaatatcgtacctaaaatagcaataattgcagccccaactgccgtttcatcatcttttgctttcacttgcggcgcaattgccacgaccgctgccgccccgcaaattgctgtaccacatgcggttaaaatcccaagtttcttttctaccttaaatactttcgttagtccatatacaacgaaaatcgtaaatgtaataacaaccgctgcgatgaccaatactttcggccctgccttcgcaatatcaacaagatttaatcgcattccaagtaagatgattccaaagcgcagcaaattcttactcgcaaagttcgtccctgcaatcgcatcttgagggactccaattgcagcgcgccaaaccatcccaattagaatagcaattactaattgtcccataatatttaaaaatggaagctctgctaaatatttcgcggcaattgcgattaataatgtaatcccaattccttgcgaaaatccaaaacgcttcttcttttgtataacaagtgtttgttccattttgaaccactccaataatcgtattggaacatgcatgttctttctacttacattataagagagtttctataataagtttaataccaataccaaatctctatcattagaaatacttatgataagataatagaaaaagaaaggagcccattatatgaacgtagacattttaaaaatttttgttactgtcgttgaacagaaacacttctcccgtgcagcagaattattaaacctttcacagcctggagtaagtatgcatatacgcaacttagaaaacgaatttggcactacacttattcaacgctccccgaagcacgtccaagttactgaagctggaaacatattatatatacatgcaaagcaaatgctctctctttacgaagatgctaaacaagaaattaatgaactacataacgttgtaacaggaacacttcgcattggtgctagttttacaattggcgaatacttacttccaaaaatactggctaactatgcgaatgaaaatccacacgtcgaagttcatactttcatctcaaatacagaagacgttttgcaaagccttcgctctaatcaaattgatatcggcctagtggaaggacaagtcgtatacgccgacgtagatgttgaaacatttatgcaagatgaaatgaagctcgtcgtcccgccaaatcatccattactccgcacaaatgaaataaatgaaagtacactccaagatcaagtatgggtattaagagaaagtggttctggtacacgcgcttatagtgaccgctttattcatcaacaccatttaaaaatgaaacgattctttacattcagtagtatccaaagcgtaaaggaagctgttagtgccgggcttggcatcgctatcctttctgattggactgtacggaaagagctattagcaaaagaactattccacgtcgaagttccaaatgaacaactaatccgtccgttctccatcgtgcgcggtaaatatttcattccatctaaagccattcaagtgttcttaaatcatgtagattcttttgcgaaaaaacagagttgaccttcacattagtgtgaaggtttacaatacatgtaaaaggagtgaaatacattgcgaattggagaattatcaaaagaaactggcgttagtgaaagatcactaagacattacgaagaaaagggcttactcccttctaagcgccttgcgaatggttaccgtgattttgatgaaagtgccatcgaaaaagtggagcttattcaaatgtacttacaaattggcttaaatttagaagagacggcaaggatgctgcgctgccttgaaattgaaccgcacctgtacgacaatccgtgcagcagtatccttacgctttacgaagataaactcaatgaagtaacaaagcaaatctcattgctttccaacatccaaacgaatttgcaaaaacacgtttcactcctaaaacatgcaaaagaaaagggatgattacatgtttgttatacatggcagttcaagacaaaacggaaatacagaagctttaacacatatgatgatagaggacattgaaacagaacaaatttatttgcgtgatcatactgtctatcctattacagaccaacgtcatgatgcagaaggattccaatccgtaaatgatgactatgagcagttaacgaaacgcatgctagaacacgacacgattatctttgctacaccattatattggtacggaatgagtggacatatgaaaaattttgttgatcgctggtcacaaagcttgcgcgatacatcccttcatttcaaagaaaaaatgaaaggcaaaaaaatgtatgttgtcatcgttggcggggacaacccaaaggtaaaagcattaccgcttattgctcaattccaatatatctttgattttgttggctcttcatttgaaggttatgttatcgggaatgcgaatggactggatgaaattaaaaacgatgctgaggcgctggcaaaagcacaattgtataatgatacattcaaaaatagcgaacagaaataagtttgacaaacccttttgtatgcgcatacaataaaagtaatattatgaaaggaaggtactttgaccaatgaagttctaattctcttatttatttcatccatcacaaatagtgaacaaaaatgatgaaaactagcaggggattagtctgtccatttgtcgatactttctttcgaaacgatcatgtaaaaaatcgtttatttatgtacgatttttttacatacaagggcgacgtttatcctctctagtgaaactagggaggtttttttatgactattttattcgcaagtaatattgaaaagagctttggtgatcgcacactatttacattaccatcactggaaattcaagcacaggatcgcataggaattgtcggagtcaacggagctggtaaatctacgttattacaaatattaagtaaagaaatagaagctgacagaggcatagtaactcatcatagttctatcagcatcattcctcagcttagcgaagaactaccggaaactgcttcttctcttgcaaaaggaaaatggagtatttcaaacgttaccgacgcaatgagcggcggtgaacgaatgcggctaaagatcgcccatgctctcgaacaaaatgcaggcattttattcgctgatgaaccaacaagccacttagatatggtcggtacagagcaattagaaaaggcactttcgtcttataaaggagcacttgttttaatatcgcatgatcgtgaatttctagataatatatgtaccaaaattattgaaattgaagacggtactattcaagagtacaaagggaattattcaaactatcgaaaacaaaaagaacgtgaacgaatacaaaaacaagcagaatatgagcaatatgtacaagaaaaaaatcgtttagaacagtccattctacaaagaaagcaacgtgcttctaacatgacaaaaatcccaacgcggttcagttcatctgaatctagactttataggttaagtggggctcatggccaagaacaggttagcaaagcagcgaaggcattagagacacgtctcgaaaaactagaaaagaaggaaaagccaaaggatctttctcaagctcaatttgacgtgcaataccatactcccattcatagtaaggtggcagtacaattcaataaagcaacaaagaaaataggcgaccgcacactatttaaaaatatgaatggaactattgcccctggtgcaaagcttgccgttttaggggcaaatggaagcggcaaaaccactttgttcaacatgcttctcacaaacgagcgtggcatgcagctatcgaaaagttgtaaaattggatacttcgaacaaacattatctattttaaaaacagataaaaccattttagaaaatgttctagaagaaacaaactatacagaagcattcgttcgcacaatacttgcacgacttctattccgccgtgaggatgttcataaacctgtgcatgttctaagcgggggtgaacgaatgaaggttgcactcgcaaaagtatttttaggaaactataatatgcttctgctagatgaaccgacaaactatttagacttagcaacgcaagaagaattagaaaccatgttacaagaatatcctggcacaatacttttcattagccatgaccgtgcctttattcgctctgttgcagaccatattctacaagtagatgagagtgaaccaagaatcttccacggtaattacgagcaatacacaaaaagaaccaccggagcttctgtaaacgctactgagcaagaattgttacgattacaaacaaaattaacagaagtcatcggccggatttccattccaaatcatcacgatgacatcacatctctcgaacaagaatacgcaaaattattaactcaaattcaaaaatgtaaagaagcgctctaatgtcttccctatatatcgacggggccttccacatttcccaagaaatattgaaacttcgacatacaaagtaaaaagccgtgcatcagcacggctttttactttatatgcggacagcagtcccgctcaccgcaaccattaacataccttcgcgaactacttcgtaatccacgtcgataccaacaattgcatttgcatttttttgtcttgcgaaagttttcatctcttccattgcgatgtcgcgtgcttcttttaatttactttcataagcgccagcacgaccaccgacaacgtcacgaacagaagcgaaaaggtcacgaacgatattcgcacccataatcgcttctccattgacgatatcgatatactcaataatttcttttccttgaattgtagacgttgttgttacaatcatactttatagcctcccatatgagatttttacctacttatggtgcactaattcagtacaaattatatttacgaactaaactgagcttcgtataacctactgtatcctccgccttgctcaattaattcattatgtgaaccttgttctgcaatgccatctttatttacaacgacgatgcgatctgcatttttaatcgttgcaagtctgtgagcgataactagcgttgtgcgaccgacagctaattcagcaagcgatttttgaatcgcaagttctgtctctgtatctagtgcagaagttgcttcatccaatattaaaattggcgggtttttcaagaacatacgagcaatagctagacgctgcttttgtccacctgaaagtttcacgccgcgctcaccgataacagtatctaaaccttccggctgtgagtaaattaaatcttctaactgcgcacgttttactgcctgccaaatttcaggctctgatgcctttaaatttccgtaagcgatattttcacgaattgttcctgaaaataagaacacgtcttgctgcacaattccaatttgcttacgaagtgaagataatgtcatatctttcgtatcaatcccatcaatttgaattgatccagatgattgctcataaaaacgtggtaataggctacataacgtcgttttcccagctcctgatggtccaacgaacgcaaccgtttcacctgcatgtattttcaaactaatgtcatttaaaattggttctttattttcatatccgaacgtaatgttgttatattgaatatcaccatgtacatgtttaacttccattgcatctttagagtctacaatgtcaggctctgtttcaagaagctctacatatcttttaaaaccggcgattcccttcggatagctttcgattaccgcgttaattttttcaattgggcggaagaaaatattcgttaatagaacgaatccgataaatccaccgtacgttaattctccttgcagaacaaaccatgtaccgcatattaagacgaagagcgttacgagccgcatgagcatataactaatcgatgaatttaacgccataattttatacgccattaatttcgttgtacggaaacgagcgttgttgacagcaaattgctctttctcaaacttttcatttccgaatgcttgtacaacacgaattcccccaacattgttctcaatgcatgcattaaaatcagcaacgtctgagaataaacgtctaaatgtacctgtcatttttttattaaagtaaagtgctaaccataataggaatggaatgacgaagaacgttaataacgctaacttccagttgatcatcatcataaatgagaatgccccaactaaagtcattacggcgataaatagatcttctggtccatggtgagcaatttccccaatttccattaaatcgtttgtaaggcgtgaaattaaatgaccagttttattattatcaaaaaatctgaatgatagcttttgaatatgatcaaataatttctgcctcatatctgtttcaatgttaacaccaagcatatgtccccaatatgtaacgacatattgtaagcctgcatttaacatataaactgcgagtaaaccgaaacaagcccataaaataagcgtccagttttgccctggcaataacttatcaataaattgatttacgataagcgggaagccgagttctaataatcctgcgacaaccgcacaagaaaagtcgagtataaataaacctttatacggtttatagtacgagaaaaatttacgcagcatatcttacctccattttccaaaattaaaaagactccctaaatgataaccattatcaaataattattcaagttatccgtctatgaaactgaaaataagctttgcgatagttgtcgttttttgctggaaagtcgatatattcgaataatcgccgatatatttcgagttgcgctgatatattcggataatcgccgatataaatttcatttactaactacccttcccccaaaaaaacaaaaaaggtatcaccacaaggtgatacctctccttctattacatcgcttccgaatcccactcgtgctcctgctcaacgaatacaatacctaattcgtgatgcccaccaacatataatgcagtttgtgcaagacgaagctcaccatttgtatctaatacttctaatttacaaaatgctcctgtcgtcttcgtttgaagcgcatcataaaattcctcggcgctttttggaatgactccatttactttcgtaataatttctccaggcagtaattttagctctgctccaattgtatttggaattgtatctagtacaacgagcccatcattgcgtgcagcaaaatatgctggtcttgtttcatcggcaattttctcttgcatcgagattgtgaaacgcccaagcattgcgactcccatcgcgataattgcaagtacgtgccaccagtaacttgcgactcctaaaacgagcacaagtcctgctaatccataaacacgtcttcctgtaaataataaggcttccgtcggctcataacttttaatctttctcataaatccaattaaaaatggaacgaggaatagagaatatgtatttgaaccgattgaaacgacaggccaccatgaaataaactgcgttaccgcatcacccggtacaagaataaaaataggaacgatccataaacgctttgattcgtgtaaaccaatctttaatccacgcttccccttcctaatcctcggcgtcgaatatcctactgcgtttttagaaatcaataagccttctacaataagcataacgcctagtaaaataacaagggatacaatggtactctcttcaccttctcgaagctgtaaaaaggaaactggtagcttagaagataatagaacacatacaatcgcaatgctaaatgtataagccgccgataaatatcgatacatagccgttaatccaaatagtaacgtccaaattaaaatggcccataagctcgctttagaaacaacaagtccaagcccaatcgtaacaatagatactactaatccgtatccaatcccttcaaatagagaggttcgcagttcaaaccaaatatcataaactttaaaagaaaaatcttttcgttctcttaacatacgtaagtatccaacgaagatactacttattacaaatatatagacagcagggtgtaagaaaaaacgtccaactgcccgcattatttcaaaaatccacgcctccatgaactcattcaccaccatttatatcattctttctttttatattatcataactaaacaaacgtttgtttaacacaaaaaaatacaggcagcaaactgcctgtatttcttcttattttgccattaattttaatgctgactgtaattgtagatcattttctccagaacgaattttttcgataattttagtttgaatcgcttcagctgtctttttatcaagctgtcctgtcgcttccatctcatttgcattttggaatgctttcagagccgattctgtctctttactaaagtatccatcttcacgacctggtacataccctaagctcttaagcatttcttgagcatgttttacttgtacatcatttgaattgtatgaaagtgttttttcaatttgaattggtgtcgcatgataataatttggttgcttcacttctactgttggcgcgattccttttttatgaatccagttcccatccggtgttaaccatttaaacatcgttaatttaatgttgctgccgtctttaaatggaacagcttgctggacagtacctttaccaaatgtcttttcaccaattaaatcgtatccttctccttcttttagcgcacccgctaaaatctctgaagcagaagcacttccattatcaattaatactgaaattggatatggttttctctctttcagttccgtagagaatttcttcttctcaccatttcgctgctctacttgtagcatcggctttttattcgtcataatttcccctagtatatcttctacactatttaaatagccaccaggattaccacgtacgtcaataactaagccttttatatttttcttctctaactcttttaactgatccttaaattctttcgctgtattttcagcaaaagaagtgatttgcatataaccgatatcttttccactctcttgcttcacagaactaaatactgtaaagattggaatcttttcacgcttaattttaaatacgatcggatcagttactcccgcacgtttaatttcaattgcgacagtcgttccctttttaccacgaatttttaatactgcttcttcacgtgataagtctttcacactgtttccatctacagataaaatttggtcattcggtttaattcctatcttttctgctggtgaacctttaattggcgatacgataataagcttaccgtccgtcttgttcacctcagccccaatcccctctaattcgggatcaagcgattcactaaactgtttggctgtttctttatccatatacgtggaataagggtccttcagcgtagacaacataccttgtattgcaccttcaactaacttttcatctttcacgtcttccacataacgtgaatcaattagtgcatacgcctcattaatttttgccaaattcccttgcgcagtgctagcattcccactcgaaattgtttgcgttacttctgatgggttaaccccaaatacagacatgcctgcaaacattccgccagcaccaattaaaaatgcaacaaccattccaataattgcaactctacgtttcaatgcggaattcccctttccaaaacacacaggtggtgtagcaaaaggcatcacacagtgtgtgatgcctttacctatttctactatatgataagcttgtacgaattatgtttgcaactttttatacttttaagaagcgacgaattgacattacacttccccacataccgattaaagcaccgattaacactagtaaaccagctaattggaatacgaacggactgtatggtagaagctcgaaaattgttccgccaagtttttcattaaacacaccttgcaacgaattatacgtaattagaattaggccaattggaataattgatcctaatactcctaagaataatccctctagcaagaatggccaacgaataaaccagtttgttgcaccaacaagtttcataatttcaatttctgtactacgagcataaattgtaattttaattgtattagagattaagaacatcgctgtgaataaaagaccagcaattaacgcaatcccaatgttacgaccagtttttacagtatcaaataatcgttcaacttgcccttttccgtactgaacattactaacaaactgcattttttcaaccttcttcgcgattgtcgctgtatcggttggctcttttgcttttacaacgaatacgtttttaagtgggttatcttgttcaaataactcaaacgtttttccactatcacctaagcttttaattaaacgttttaactcttcttctttagaagaatatttaatagaatctacttttgcaatcttactcatatcttcttctaatttcttttgatccgcttcttttgcagctggatcaatgtgtacacgaatctctacatcttgctctactttcgtcgcaaaatggttcatattcataatcgctgttaaaaagacacctacaagtaataatgtaactgttactgcactaacagaagcaaatgtcatccatccgttacgtgatagattctttacaccttctcgcaaatgtcgactaagggtcttagccttcatatccgtatcctccctcaatctcatctcgaacaatttttccgccttcaatcgcgattacacgatgacggattgtatttacgatatctgcattatgcgtcgccataacgatcgttgtgccgcgctcattaatgcgagtaaaaatattcataatatcaagagctgtttcaatatctaagttacctgttggctcatcggcaattacaacctttggtctatttacaattgctcttgcaatagccacacgttgttgctccccgcccgaaagctcacttggaagtgcgtctgcacgatcttcaaggcctacaagacctagcacttctgttacacgctcacgaattgcatccggttcttcttcaattacttctaaagcaaacgaaacattctcatataccgttaatttaggtagcaatttaaaatcttggaaaattacgcctaattgacgacgaaaatacggaacgtctctttctgccaatgtttcgatagtaagtccatttacattaatagatcctgtagatggtttctcttcacgatacatcattttaataaatgtagatttcccggctccactcggtccaactacgtatacgaattcaccttgtttaatgttaactgtaagaccagcaatggctttcataccattcgggtactccttataaacattcgtcatttttatcattatttatcacccaatacttaatgatttttttcgaaatacttttctgtacatctgaaaataaaagacatccttcattttcatttattcatccttgttgaaggtagtttacttatgctttctcataagcaataccactctatgtaatatatttcagcaaaattctacaaaccccattgtaacatcaaacggtttccaatttggatacatttttgttacagttatgttacataccagaaaaaaggaaaacgagttgactatattatcaactcgtccatttcaccttttttatttatgttcagctaaccattcagatacttttttcgcatcttcaccttgaataagtcctggtgacattgaaccgcggccttttttaataatctcttcgatatctgcagcgtcgtacttaccgcctacttttcttaaatcaggtccagttgcccctgataaatctgttgcgtgacatcccgcacaacttctttggaaaatttgttctgcgctgtctgtgcttgcagactgtttcgaagacttactctcttctttatttccgcatgctcctaaagcaaaaacaaccgatgtccctagcgcaatagccaacaatttctttttcacttctatcgctccctattgttgatattctttttattcctaacacactcattttcattataagcattatctttatatagaaaaactaaggtgtatttcatattcctcaaaaatacagtgagaaccttgataaaataaagctttcataagttgtttcaattctgtgaacaactaaaaaaacttctataaagtatcctttttaaaaggaaaattagaaaagttctatataaatctttaccctattaccgctctattttactattctctactttttacaaaacaatatacagcattgtaatctacatataatcccatcaaaaagagaagttgtcgtttccaacttctcttcctctttacttcatctataaaaataaaatcaaattctttatatcctctattgtcctcagcatgcgccaacaatttcgttggctttttttcgcttattagatgcgagaacgtaagtaagcatcaataaatggatcaatctctccatccataacagcttgtacgttaccaacctccgtatttgtacgatggtcttttacaagagaatacgggtggaatacataagaacggatttggctaccccatccgatttctttttgctctccgcgaatttcatctaattctgcttgttgctcttctagtttcttttgatataatttcgcttttaacattttcatcgcatgctcacggtttttaatttgagagcgctccgactgacatgttacaaccgtatttgtcggtgtatgtgtaatacgaactgctgaatctgtcgtatttacgtgctgcccaccagctccacttgctcggtacgtatcaatttttaaatcttctgtacgtacttcgatttcaacttcatcattgaactctggtacaacttcacaagatacgaacgatgtatgacggcgccctgaagaatcgaatggtgaaatacgtacaagacgatgtacacctttctctgcttttaagtaaccgtaagcgttatgacctttaattaataaagttacactcttaataccagcttcatcacctggtaaataatcaaccgtttctactttgaatccgcgtttttcagcccagcgtgtgtacatacgtaataacatagaaccccagtcttgtgactcagttccacctgcacctggatgtaattctaaaatcgcattatttttatcataaggatcacttaatagtaactgaagctcatactcattcatttcttgaattaagccttttacttctgattctaattcctcatgtaaatcttcatcatactcttcttttaaaagctcatgcgtgatttctaaattttcgaacgtctcatctaactgacggaactttccaaccatatcttttaacgcattcgcttcattaattacagcttgtgcgccttgttggtcatcccaaaatcctgcgcccatcattttttcttctaattctgcaatttgtttctccttagtagggaggtcaaagagaccccctaaaagccgctaatcgcttagccattttctctaattcctgtctaatttctactaattccatttccttcacctctatgtaattgctgttactttcgtatgaaaacaagggaaactctctccacttattacggagagagtttaatccttcttaattatacatttttgatataaaagtttgcaaaacagccaaagctaccgtcctatattactgaacgataccacagcagtttttatattttttaccgctaccacatttacataaatcgttgcggcccacttggtcaccttttacaactggctttttctttgcttcttcgccatcactagaaggatgaacagcttcaccttgcacaacttcttgacgttctaagttttgttcaatttcagctttcataatgtaacgagaaatttcctcttcaatagaagcaaccattgactcgaacatcgcgaacccttccatttggtactcacgaagtggatcgatttgaccgtaagcacgtaaatgaataccttcacgaaggtgatccatcgcatcaatatgctctgtccatttcgtatctacaacgcggaatacaacaaccttctcaaactcacgcatttgctcttctggcataagcttttccttttcattgtatcgctctattaatttcgcgataatcggttcgctcatttcctcaggagcaaggcgacgtaattcttcttcttttacatctccgtcttgaagaaggtttgtatttaagtagtcaacaagacctttaatgttccaatcttcttcaatttcctcttgtgtatgaagggcaacagcacgttctactgtagatttcatcataccttcaataatgccgcgtaagttgtcagactccattacctcttgacgctgtttgtaaataacttcacgttgttgacgaagtacatcatcatattgcagtaactgcttacgtgcatcatagttatttccttcaacacgtttttgtgcagattctaccgcacgagaaaccattttactttcaatcggctgagaatcatccataccaaggcggtccatcattgctttcatattatctgaaccaaatcggcgcattaattcatcttccatcgataagtagaactgcgtaacaccagggtccccttgacgaccagcacgaccacgtaactgattatcaatacgacgactttcgtgacgctctgtaccgataactgctaaaccaacgtttttcacatcgtctccaagcttaatatctgtaccacgacctgccatgttcgtcgcgattgttacagcacctttcataccagcctctgcaatgatatctgcttcacgagcatggtttttcgcatttaagatgttatgacgtacacctttacgcgttaacatttttgaaataagctctgaagtttcaattgcaactgtacctacaagaacaggttgtccttttttatgacgatttacaatatcctcaacaacagcattgaacttaccttccattgatttaaagattaaatcggcacgatcatcacgaataatcggtttgtttgtcggaattacaataacgttcatattgtaaatgttacggaattcctcttcctctgttttcgctgtaccagtcataccagataatttttcatacatacggaagtagttctggaatgtaattgttgcaagcgtcatgctttcattttgaatttctacaccttcttttgcttcaatcgcttggtgtaatccttcgctataacgacgacctttcataagacgaccagtgaattggtctacaattacgatttcgccttcttgtacaacataatctgtatcacggtgcataacaacgtgtgcacgaagcccctgattaatatggtgaagaagtgctacatgttttaaatcgaataagttttcaatatggaaagctttctccgctttcgtaataccatcttctgttagcattacatttttcgttttcacatcaaatgaataatctttttcattttctaacgtacgaacaaatgcatttgcaaacatgtatagctctgttgatttttgagcttgtcctgaaataataagcggcgtacgtgcttcatcgactaaaatagaatcgacttcatcgataatagcaaagtgaagtggacgttgaacgcactgctctttatataaaaccatgttatcacgtaagtaatcgaatccaagctcattatttgtgctatacgtaatatcagcagcataagcctcttgtttctcttcgcgtgacatactatttaagttaattcctaccgttaagccaaggaactcatgaagttgtcccatttcgctcgcatcacgttgtgctaaatattcattgactgtaacaacatgaacaccttttcctgttaatgcatttaaatatacaggtaatgtagatgttaacgttttaccttcacccgttttcatctcagaaatattcccttcatgtaaggcaataccacccattaactgtacgccatatggacgcattccaagaacacgagttgccgcttcgcgaacaactgcaaaagcttcaggtagtagatcatctactgtttcaccttttgttagacgttctttaaattcaagcgtctttccttttaattgttcatcagttagtggcttaatagatgactctaatgcatcaatttgctcaactgtcttttgcatacgtttaatttggcgttgatttacatcaaacaccttttttaaaataccgatcataggaaatacgctcctctttttattaaaataaaacttccgattgttttctttttctctattacaatcagtcgttataaaaatcaaatgtatgttatgccaatttttctcctaattaaaaaaactaaaatgtatatacctaatgataattgtaacacttgtcttataactatgacaacaatcggcaagatgtcgggccttatattcaaaaaaagtttttatttcatttgttacgttccttttctctgtctcgctatttcaatttcacgttacaaatttcgtattaaatctaagtcatattctttcaagtttcctttgaaagaatatgactaccagaaattccttaataaaatctaaatcaacaattacaaaaagccggaaactttgcaggtgtagcatccatagatacttacacctacaaaaaaactccgactttaaaagatattgttatgttgcaaaatctacaaataccattaacatatagctgtatcaatcataaattttattaatttatcggtatttccaattcatgatatttccctttcctatccttcataaaagaaatgaatttcactttagttgattcatttgaaaagtttttataatttttataagggtcatctcctgtaaaataatttgtccctatataccctcgtaccgttttaccagcaggtattacaggatcaaactgatattttttaggtaattccattgaataagggattaaattataaaactcacctattttagaataaaacattgtatcggaaatagacttattactaagcaagttaatatctcgatttgttgtatttgtaatatctaaaggtaacacatacgtcactacttcacggtcttcatagggatcataaacttttgtaggatcaagaggatcaagtgcatgaaacgtaattcctcgctcatcttcaaaagttctattagataaaaactcatcttttaccactttataagattcattatttagatttaatgttttaaatctaaataaactagcaaatatacatagcaacagacacaatccaatacttattaagatatgttttctcgtcactcttaatctaccaactttccattattaacatgtacaatacgatctaccatttcattatctagaacatgcacatcatgactggctacaacaatagtcgttcccttggctttttctactttcaaaatatctaaaacatcttttatcccatcactatctaaagcattagttggctcgtctaataacagtaattttggttgttccattaaagcttgcgctatccctaaacgttgtttcatacctaaagagtatcttttatactttctcttatctgttttatcaagtccaaccctttgaataatattataaatctcctcatcggagattttattgttaatcgatgataaaaatttcaaattctgaaaaccagtataccctggaataaaacttggatattcaatcaatattcccatagaatcaggaaattgcttttgttttccaattatttcattatctatataaacaactccagaattcaagcgcattaaccctgatatagcgcgtaaaatcatcgttttaccagagccattatgccccttcaaaactaaaaattcgcctttttttactgacaaactaatattatctaacacaatatttccttttaatcttttcgtcatacattcacatttaatataattgtccataaattattcacctatcacatctagttttttaaaacaaaaactacctaataaaatcattacaacaacaattactactcctattaaaagtaaatcattatattgaatagattgattattacctaaagtcaattgaattgaactgtgatcaacaaaataccaacgatttggcataacaaaagagcctaaaaaataaatactatgaaagaaaatagacaaaaataggtacaacaacattagtacaaaaacaatagttatcggtatataaaaagttaaaaactcaaaaatcaaagctaataaaaagcttataattatttgaattagcatagtacctaatatcttataaggaaattgactatataaatttaaaaaattatactcgcctaaagaaagcaaatagtaagcgctaaaccaaataaaatacataccaatccaaataataattatataaaaaaacaaagataatattttcgttaaccacagaaaatgcttcttcttaacacgaggaaataaataaacaccattctgttgaatatctgaaaaagcaaaattccctacaagcaacaaaggagtgatttgaaagaatatccaataaaaagggatagaaaatcgcccctccttataaaaataagataaatccacaaaatctactccatgaaaaaatcgataaaaggtaacatctactaatacagattctttaccattactaagaggctgattgtataaaaaggcaattgcaataatagcgtaaattaagaataaaaaaaccattatcttgatggaatctcgaaaccttacatataaatctctttttaacaaataatataagatcataatgtaaactagaccacctctgtctcatcattcatagaaatataactttttttagataaaatccatacacttataaaaaagataaaaaaacagccaaataagcgtataaataaaccagtagcatcttcaaagacatttatataaaaagcatttgtaaataaaaatccatgtaatataaatctatctaataaaacagcagtaatcatacatattattacaagtaaactaggtaaaaataattgcaataaagcacttatcatacatataaaaacactcgcaaataattgaatgcaaaataataatggataatttacatcaacactagttacagccatcatagttgacatcaaaaacaactgtaaaatcatactcccagcaaaaaagtaaacaaaaacgaataattttaaataatatatagaaactaatttcaatgcattattcactctgtaaacaacataaatactaaaaaagttcgacatagaatatacagaaaaaacaattgttaaaggaataaatatagtcgacaaattatacaacgaaataaccttatacaaagcttccaattcgttcattttctcttttacaattccgggttcaaaataattgaacaagcaaccaatgatactaacattaagtacaaaaagaatacttaaccaaacatatttcatccttatagtttctttcataacattataaaagaacatgcttcctactcccccgtaaataaagaactacagaacaaaaccaaatacataacagtacactaagaaaaatttgcaattcaaaaaagccaaaatctttaattaaataatctttaggattgagaatcccttttccaataccaagccaaaaaatatgtaaaataaatggaactaaataaataaaataaactcgttttataaaaaacgaaactgataaagctaaactcgaaaaaaccgcaccgtataaaccatttaaaaatacatacattagaaaatataaagtagggtacttataataaactatatgaaattgagctgttggcgaaacagtagaagccatataatttaatattggatgcggagcaactgttggataagtcatcacatataaataaaaattaaatagtaaagggacacttataataaaaaaagatacgctaaaattaataaaataaagcagcttaaaataataacatgttcccatcttagaaataacaggataaataaatccataatttttatcaattctataaatccctgctacagccattgcggaaagcataggaaatataagtaaataaaactcactataaaacgataatctattaaaatataaaatattagataaatatggggatacctttataatcccagcatcgttaaatcctttagttgtcacaaacatagcaatatattgagcaataacaattactaacataataaataaagacaaccaaaacatcctaccttttaaaatccttcctaaaaagtaactcatctatagctcctccataaaccattaaatttaaatcttttttaatatgaacaattgatccgcaacaccataacatttcttttctttatttaaccaaatgtaacgaaaagaaacatttgctctctctccttcaaatttaggaaactcaacttcatactgataaacatcatttgtgccttttctttttacactcttaacttcttgtttccactgaattacttctccatcagtttgttcaatccgtcccaagagatacgttggttttttcttattcgtaacacccgtcaaaaaaacataataattttctggtataactcctaatttcaattttttatttgaaagcttatcctctattaaactatcatttttttctatttgtccttgaaagaaatcatcaccattttcactttccaaaaacacttgttcaaaaatagtatttttgttaattccttttaattcaatacttttcaaattatctttttccgttaaagtatcttcaatatgtacaataggttcatctactttcttttgacaagaaactaagaaactaatactcaatataaaaaaacaaactaaaatatattttgaaataaacctcattacagctcctcctattttaaaaatgaaatagcaggaaaagtcgtataatccggatttgaaactatacgactttttctagcactataaaataaataatttcaatttataatttctaaatcaatattcaatgtaaggtccactatgtcttacactatcaggactccaagcagtaggataagcattattttctctagaataaccaccaaatctcacaggcacatttttcccatggttttcatatgcataattttgaaaaagatatgttctacctggtatcactgttccttcatgcttacctgaaacatttacccattttctatcttctgcatttttatttttatctgcttctgtccaaacattgaaagaacctccgcccttctcactgctcttcacacgcatatacatagaggtaggcgtctctttaggacgtgcattagtataatcatatggactccaaagtctaaaggtaaaattcacatggtcatcccttgtactagccttagccggttcggttaaagcgaaagtactagctaaaatacctaacgataaaacagatccaaacataaaacgactttttttcttaatgcccactaaaagcacctccgataatttgtagcattatattgattgtatttttccactgaaggaacaaaatcaatataatacaatattatggtaacaacacctcaacacaccttcaatggatttcagaatatttaatattacttttacacttgcgaacatttcgttaaatttttaaaaacaatactatatccctagcaaagaattacttgtaaaggtagctacattcctatgcctgttccaaataataaagagtaactcacctctctaagtttcgaattttctcctgctgttttgaggaaataccgcctaaaaatcacttcttaatgaaatcggctacttataaaacttttttaaccttgctgcgaaaaatacaaaaaaagcgcagccatttcggctgcgctttcgaattattatttagtttcgattaaaccgtatttcccatctttacggccatatacaacattagtttcgtttgtatcagcatttgtgaagacgaagaaattatgtcctagcatatccatttgtaggattgcctcttcaacgtccatcggttttaaatcgaatcgttttgtacgtacaagttctaattcatcttcttctacctcatccaaaacagctactgcttctggaaggataaagttcgttttcatagaacctttctcacgtaacttacgatttacttttgttttatgtttacgaatttgtcgctcaattttatcaactactaaatcgatagcagcgtacatatcgctattagtttcttctgcacgaagtaataaatcagtaaatggtattgttacctcgacacgttgcttgtcagagtatacttttaaattaactttaatctctgggaatgtatcaaaataacgctctaacttacttagttttttctctacatattcctttaatgctggagttacttcaatattttcaccacgaatgttgaatttcatagatgaattcctcctttcaagcctatgtattataatttcgacattggcttaaaaactccttctaacttttttaaaaaaattagtggaattgcgatttttttatcgttttttgttgaaatgaaaagatgcatcgtttctatctttattttatcctattaacatcgtgagtaacgaatataactgtggacaattcgttacagaaaagaaacaactttttgacaacttacactataacaaaaaccccttgcgaaaaacaagaggttctactacatatatataacgttgccacaaacgcagctttctcttccaaaaacaatataccctacagtttcacaacattagctgcttgtggtccacgtgctccatctacaatgtcaaactctacttgttgcccttcttctaatgacttatatccatcttgttgaatagcagaaaaatggacaaatacatcgtcaccatcttcacgctcaataaacccaaatcccttttctgcattgaaccatttcactcttccttgcatgttcattccattcccttcactctaaaaatcagggcattcgccccatattttgactataacgaatgacaacatatgaagtcaaagaagacttatcgcctttttattatccctttcgacactgccatattaacttctacaaagtgtcaaactagatacttctcttgcccctctttcatataacaaacttccgatttgcctaactgtaatccctgtcgtatacacgtcatcaacgagtaaaatatgttgctcagaaaacatctcttctccctgaaaataaaaaggattgcttcctgacaccctttctttacgtgtcttcttactttgcttttctgtttcccttcttcttaatgatggataagaaattttgacaggcaaacaagttgctaataactcagcttgattaaaaccacgttcaatttccctttccttactaagcggaacagcgataacggttgaaacattggcaaaatacttttgaaataaacttcgaaaaggacgataaaaaatgtgcactaactccgcatccccccgaaacttaaactgtgctactatttctttcatctcatcatcatacatatataacgaacggtttttaaaagaacgatacttctcctctttcgtccaccttatacaatctatacaaataccgtcttcttgaaatgcggcaggaacaaattctaaaggtcgcccgcactccatgcaaatttctcctataatataggaaagtttctgctcacatctatcacatatatattttctatgacactttacaaaaaaagtgtaccaactaatcttttctacaaaacactcatcacaaagtaaacaatgcattaatcgatcaatccttgttctttcgcatttttattcataccttgaatatgttttttcgcgcgcaccatcgcctctgtcttgccatagtgaaaataaatgacctctccatacggtgcttcaaagctccgccctgctcggcccgcaatttgtacgagcgcactttctgaaaacatttcttcttccgcccccaaaactgcgacttgcaaatttttcaccgttacgcctcgctctaaaattgtcgttgtaactaataatgggatttctccctttttgaaagccgctactttttcttttctccctggatcttctgcatgtacaccttcaattcgattgtttaatggttttaacaacaagcttatttcttctatatatcgcacatgggggacgaataaaaaaatagggaattttttatttaagtatgtttgtaaccactgtagtaaaactcgaggaattcttttatgaatgaggttttttttccaattcccgcaccaacaaaataaaggaactggcaaaggatgacgatgatatcgtccagaaacaataacacctttttgtttaccttgtttaagttttcgcttccacgtttcatctggagtcgcagttaaataaatacgcgccgctttttctttcatcgcttgttttaccgcgtactgtaacatttgatctgcacaatatggaaacgcatctatctcatctacaaccatgacatgaaacgccctataataacgtaataattgatgcgtagtcgcaacgactagtactgcatctttttctttatccacactccctccatataaagccgctacctttatatatggaaatacttcttgcaatctcggtgctaattccagaacaacatccgttctcggcgttgcgatacaaactctttctcctttttgaagcgcttcgttaattccgtaaaacaacatctctgttttcccagccccgcatacagcccaaataaaaaatgattctttttgcttaatagcctctataactccttgcgccgccaaattctggccagtagacaacgtcccgttccactgtaacaaatttgaattcttttctctctttctttcagcaatcccgcgaacaagtacagcacattcacttactctccccatcgttatacacttccggcaatatgcgcacactttactgcaccttttacataaaaacgacgcaaatagccgccgatctacatttccgcagcgttggcacatatatttagaattcttcttttttacaccttgtacacatacgatctctcccttctttttcaaatcgtttaattccctctgtaaatctgaagaaagttcttctaatagcaactgtttccccgctagcatcaacaatcacctccagcactactataaacctttctcatcatctcgtaaaaactcaaaaaagccgataacctacttataaaatagtaagctatcgactttatacacggtttttattcttttataaatcctagaatcgaccgtatcctaagaaatgtttttggttatacgaactgttaatatcaccgtacgcaattcctttatcgctagcatggatcatttggccattaccaacgtaaataccgatgtgagatggacctgctttataagtaccttggaagaatactaagtctcctggttgtgggctatctactttagaaactgagttccagtaacccctaacgtcttgacgacctacaccaaagatgtaagaaatgaatccactacagtcaaaaccaccgtttgatggagatgcacttccccaaacatatggtaaacctaagtagctttgcgctttaccaattacgccacccacatttggagctggttttttctcttcttgtttaggtgcttcttttttaggctcttctttcttaggctcttcctttttaggctcttctttttgagcttgtccaccattgtttgctggtgcagcttgctctgcaggtgcttgtgctggttgagcttgcgcagctttagcagcttgctctgcttgtttttgagcagcagcttcttgtgcagcttttgcttgtgcttcttcttcggcaatgcgttgtaattgtaatgcttgtttctcaagctctttcaattgaccttccgtacttgtcattgaagttacaactgtatccattttaccgcttaaatcgtttaccgctgttgcttttttctctttttcagcgtcaagttctttcttagcagtttcaatttgagcttgtgcttcttttaattctttttgtttttcttttaccgttgcaacatcttttttcacactagcttggtcttcttgttgtgttttcatgatatcttcatcagactcaagaattttagaaacagaagttaaacgatcaactaaatctgcaacgtttttagagtttacaagaacttctgttacaacgttcgtatttggttgttcttgaagtgcaactaaacgctttcttaatagctcttcacgttttgcaatctttgtttgtaattctgcaatatctttatttttcttttcaattaattgctcagtatcagaaacttttttcattgtttcatcaagctttgcagcattctcttgaacagatttatctaaaccttgaattgttttgtttaagtcattcatttgtttttgtaattcatcacgttcttgttgttgtttatgtaaagtgtcattttgtgtgttaatttgtgatttcacatcagaaattttatcttctgcaaatacatttggtgttagcccagaaaacattaatcctgcaactaatgcacaagatgccatttttagctttttcattttattttttacaccgctttcttttttctttttccgtatataacctataaaatttataccataattcgggattttttttgctaatgttacgtttttgtaaaacaaatgtaatattatatgtagctctagcgcaaaatgcgtatatttttgtatgtatgtgtagaaatttatatacttttctcacttctataaacaaagaaaaaacgtaaggaattccttacgttttattaaatatacgaatacagatgaaatgctacttcatccatttctcagcccaattttggacctcatccataacactttctaacgcttttcccttgtcagttaagccatactcgattcgaactggtacttctggatagacattacgaactacaatgccctcgctttccaattccttcaaacgctctgacaacatacgatcgctcatatttgggataatatctgcgatttctctaaaacgtttcgactcttcaagcaaagatttaataattaagccagtccacttcttactaagcagagtaaaagctgactcaaactttggacataaacaagaattatgctccatatgtttcacctctcttccattataatatagtttcttgtaaaaagtaagttataaaactttcctcattattttattttacgtacattttaccatttccaaatattaacttgtcaactaaacgtaacatacccgtaaaaaaaccctcttaaaaagagagctttttatatctttattacttcgtataccatccaagacctaatgcaccttcacctaagtgcgtaccaattacagccccaaaataacctgtacgaattgtgacgtgaggatattttgcttctaattctttcttccattcattcgcttcctcttcacgttgcgcatgaatgataactgcttccataggtacacctttacttgcttgctcatcaaaaatttcaatgatacgttttaatgcttttttacgtgtacgaatcttttcaaacgcaataatgattttatctctaaaatataaaactggcttcacttgtaacagactaccgatgaaagcttgcgcgctatttaatcgaccaccacgttgtaaatgatgtaaatcatcaactacaaaataggcgtccatcgttttcttcatttcatcaaaacgagcgataatctcttttggattctttccttcacttgctaactttgcaccttcacgcacataaaatccttgtacttcacaactaatttcagagtcatacgtgtatacatcaataccttctaccatctgtccagctgtcgttgatgtttgatatgtaccactaattccacttgataggtgaatactaataactgcatcataatctttagctagttcttcatatagctcaacaaactttccgattgctggttgagaagtttttggaagttcctcttgttcacgtactttcacataaaaatcatctgctgaaatttcagcttcttcttgataagattctgttccaaacacaacgtttaatggaatcatatatatattgagttcatcacgaatttgcttcggtatatatgccgtactatcagtaacaatagctattttcattttcgtacctgccttataaaaagttttatttcctaattttacacgaaaactacaaatggtgcatccatacatgaaaatgccggttgaaattatacctaccatctcgacaaattacaacaaaaagataaaatactcaccaaaaacttcagcatatttagaaaaaatgtttgaatataaaaaggctcgcttttaaaatggaaagtactagtcattttgatagataggggcgtacacaattgctattacaatattttacaatcaaagactacggcgaacacgaaatcgtcattcaaaaatcaagatttatttgttatattagccgagcaacgactgaggaagaggctcaagaatttatacaaaaaataaaaaaacaacattggaatgcaacacataattgttccgcttatttaattggcgaacaagatcatattcaaaaagcaaatgatgacggcgagcctagcggtacagctggcgtaccaatgctagaggtacttaaaaaacgtggactaaaagataccgttgttgtcgtaacacgctattttggtggcattaaacttggcgcaggtggattaattcgtgcatatggaaagtgtacaagcgaaggcattaatcatgtcggtgttgttcagcgaaaactaatgcgtgtgatgcaaaccgagattgattacacattacttggcaaagtggaaaatgaattacgcaattcaaaatatgccattaaagatattcattatctagaaaatgtcacatttgatacgtatgtagaagaagacggcaaacaagcatttacagattggatgattgaattaacaaacgggaaatgtacaattacagaaggagatatgttgtacttagaacaagatgttatctaagaataacccatttatcaccttcaaagattaatgtagtgaattacttccctacaaatgaactaacgaactaaggagattatatatggaagaacgttattatcatctccaaaatagcagaataaaaaagaagcgaagaaggaaacttttcttcttccttattttcgcatttttatttggcagcataggagtttatgtgttaaattcttactcttctcttatggggatgtatagtggttttactcgtgaaaaatcggatttaagaaacgaagatgtagaaattacaaaggaaccttttacaattctcattatgggtatagaagattatgcgacagatggtcaaaatggtcgtacagactcattaatgtttgcaacagtcaatccgaaaactaaaaaggtttcacttatgagcattcctcgtgatagccgcgttccgattgttggaaagggaaaagaagacaaaattaatgccgctcatgcttacggtggagaggaaatggcaatcaaaactgtagaaggttttctaaaagttcctgtagaccattatattaaaattgatttccaaggttttaaaggtatcgttgatgctgttggcggtgttaccgttgacgtacccttcgatttttgggagcgctctgacgtggattactacaaaaaaattcaatttaagcaaggacagcaaaacttaaacggtgaagaagcacttgcttacgtccgtatgcgaaagcaagatccaaatggcgattatggtcgtgctgctagacaaagacaattactggccgctgttgcccaaaagctaaactccacctctactgtatttaaaattaaagatttaacgactgtagttggaaaatatataaaaaccgacattcctatttcagacggacttgctctttacaataaactctctggatttgatccttctacaatacaaacgttaaagcttgaaggcgaagacaaaaagataggcggtatttattacttccttccagatccaatcagtgtcgaaacggtgcgtaacgaaattgaaaaagaattaggagaaaaagcaaaaaacccaactacaaaaaacaattcaaatcctgattcaaattcaagttctaattctaacgaacaaacaaaaaaagcaacaaaccaaaataaaacaccaactgatccgccaccttctacaaatgctcatgcagagtggattatgcgcaatcagccgtaacaaaaaggcccaatctatgcgattgggccttttttatttacttattaaagtgctgtaaaattgcttctacaatacgctctgatgcacgaccatcaccgtaagggttagatgctttcgccatcttatcatgagcttctttatctgataacagctcatcagcaagaccaaagattgtctcttcgtctgttcctgctaatttcagcgtacctgcttcaataccttcagggcgctctgttgtatcacgaagaacaagaactggtacaccaagtgatggagcttcttcttgtacaccaccagaatccgttaacattaagtatgaacgagctgcaacattgtggaaatcaattacatctagcggctcaattaaatgaatacggttatgttcacctaaaatttcatttgctatttcacgaacaacagggttcatatgaacagggtacacaacttgtacatcttcatgtttgtcaacaagacgcttaattgcacggaacatattacgcatcggttcacctaagttttcacggcggtgagctgtcataagtacaagacgatcatttccaagtttctctagtacaggatgactatatgtttcttttacagtcgtttgtagtgcgtcaatcgctgtatttcctgtaatgaaaatacgtgactcatctttattttccttctgtaagttcgttgctgattttgctgtcggtgagaaatgaagatccgccattacacctgttaattgacgattcatctcttctgggtatggagaatacttatcccatgtacgaaggcccgcctcaacatgacctactggaatttgattataaaaagcagctaaacttgcaataaatgttgttgttgtatcaccatgtacaagtacaatatccggcttcgcttctttcattactttatccaaaccttctaaaccacgcgttgtaacatcaattaaagtttggcggtctttcataatatttaaatcgaaatctggcgtaattccaaagatacttaatacttgatctaacatttggcgatgttgtgctgttacagtcacaatcgattcaattttttctgggtgtttttgcaactctaatacaagaggtgccattttaattgcttctggacgtgtcccgaaaattgtcattacttttaaacgttcagtcatgtgattgcctcttttctttcactaattacagcttctattatgacatataaaaatatgcatgagtacatccctttttaacgcataacagaaacttttctattacaaatactttttcttcccaccgagtaataatctatcttttgtttcttaacatcttcatcagtataacaatttctcccatcaaataaaataggctccctcataagttgtacgtacttttctaacggatacgtttgaatatctccccattctgttacgataaaaaccgcactcgcatctctaatcgattcatctatacatctactatattgtatagcatctccaaatatattctttacatattgaattgcttttgggtcataaagaacaatatctgcacctatattaattaatgcttctattataataagagatgatgcctctctaatatcatccgtattcggtttaaaggatgcgccaagaactgcaatccgctttttattcatgttcataacttttttcgctttttcaatcaatagcagctgttgcttattatttacttcaataactgcttttaacaaacgaaaatcatgagcaacatttcccgcaatttgtaccagtgctttcgtatctttcggaaaacacgaccctccgtagccaatgcccgcatttaaaaaagatgcaccgattctcttatccattcccatccctttggcaacatccaatacattcgcgcctaccttctcacatatatttgaaatttcattaatgaaactaatctttgtagctaaaaaggcattcgacgcgtatttaatcatctccgcacttttaatatctgtaacatacgtttctaaacataattcactatacaaactctctactcttcttgctacttcctcactatccgctccaattacaatacgatctccatgaaagaaatcataaatacctgaaccttcacgcaaaaactctggattcgatacgatatgtactgtatgcctcccttttaacttctcctcaatccatcccttcattacatcatttgtacctactggaactgtacttttcgtaacaacaataatatcgttcgtcgcatataatccaatatcgttacaagcactctgaatatacgttaaatctgccgtcccatctaataaaggtggtgttccaactgcaataaatataaactctacatcatcaaatgcctcttctttatttgatgtaaaagttaaagcattattctcatatgcataatttattaattcatgtaatctggcctcataaataggtaaatccccttgttttatccgttcaattttttcatcatctatatcaaaacatgtaactgaatgccctaattttgccaatcctactcctgtaatcaatccaacatatccagtacctactatcgtaattttcatttccttttcgcacaggaatttacaatagaaaagatatgaaatatagaactcttcctgtgcttcctcctctcatattaaaaatgagaaaaaccttttccttcttcattatatgaattacttcccttattttttttaaagtttttgtaaaattaaatgcactataaagtaaaacttaatcagtgagaatccggctgccagttcacgcgtgataaattcccacattttaacacgaaacttactcatttctaggtgcaacacttataatactgaaataaaagtattcactattgaagaaaaagaggaaatgttacattccaaagcccagtacaattaaccttcttatatgattcaacattctatatacaattgtcatatattctatccgtttccattaaccgtaaaaagaaaaaaagattgaattctaatctttttgtgataccatatgttatgagcctgtaaataaacatcataattttcagataaatatattttcaaaaaaaaattacgttagactataaagggtggggtattaatggactcacaagtgatttatgccattttggcatcattcatcactgtactcgtcgttactcctttagttattaaattagcttttaaaataggagcgacagataagccaaacgcacgtaaagtgcaccaaaagattatgccacgtcttggcgggttggcaatatttattggtgtagctgtaggatttgttgtcggcggcttatatgaacaaagaatgttatcgataacgctaggtgcgattatcattgtaatcatcggaattttagatgatatgtacgagttatctgcgagagtaaaattcggtgggcaactgttagttgccatgatgattgtaaaaagtggattattagtgcaagtattatatatcccattccttggggatactgaacttggatggcttgcttatccaattacagtattttggcttgtaggtattacgaatgcaatcaacttaattgacggcttagatggattatctgctgggatttcatctatcgtacttgcaacgctagcatatatggccttcactagcccatggggtactggaacagctattatcttgccacttgcattaattatattagcaagtacaattggatttttattctacaacttccatccagcaaaaattttcatgggagatacaggagcactatttttaggatactgtatttctgttatatcgttacttggattatacaaaagtgtaacgttattcagttttatcgttccaattatcattttaggtgtacctatatttgatacgatatttgcaatcatccgtcgtatcgtaaataaaaaacctatttcagcaccagataaatcgcatttacatcaccgcttacttgcaatgggattctctcatcgcaaaacggtactaattatatacgcattcggtattttctttagtgtaaatgccattattttcactagtgcaacgttatggttatccattattcttcttttcgctttgattttcttcacagaaatcatcgctgaaataatcgggcttgtacatgaacgctacaaaccaatcatttccttttataaaaaagtgaaaaaacgcgaagactaattgtagtatagccttttcaattatgaaatattcaaatagcatcctctttcttataagaggatgctattttttattctcattttatatttccaaaatatagattgtttgagagttcctctattggagaaagctatacataataagaaaagtatcaagttttcttttttacatcttgattgtcaaactgagggtgaatgttatgatcaagcgagtatttcaatgtattattttatttttaacgattactatgtacgtatcatctaatactgaagcaacaactgttattcctgctgaatatcatccaaatactgaaacaacttctcctacacaaaaaattgcgtacttaacatttgatgacgggccaaacaaatatactacacaaattttaaacatcttaaaagaaaagaacggaaaagcaactttctttgttattggcggaaaagtgccacattacacaaaaacgatgcaacgattaattaaagaaggacattatatcgggctccacagcatgtcacatgatgtaaaacgcctttacactggtgacccttccactttaattgcagaaatggagcaaacacaaagcattgtccagcaagttacgaaattaaatacacatctcgttcgcgttccatatggtagtatgccttatttaaaaaagaattaccgtgacgcacttgtatcggcccagtataaaatgtgggattggacgatcgatacatacgactggaaaagctatgacaatccttctgccatactcgaaagagtacgtaatcaaagtgatgaacaagtcgaagtcattttaatgcatgattcgagtgtaaccgtacaaatactgccaaaagtaattgattacttacagtcacaaggatacaaacttcttccctataatccttcttctcatctcaaagtgaatttttggaaagacacaagattgtaacagctttagcgcctatgtgctaaagctgttttatttttctcttcccacccttcccatttttgtgtaaaattttaaatagtgatgaagtttcgaggtgaatagaaatgaaacgaatagatctcatttttaacgcaatacaaaaaggcaattatacagaaggtgtaaccgcatcagaactcgctacatttctgcaactagatcgcgccaatgtaagtagcgatttaaacaaacttgtaaaagataaacgtttattaaaaacaaatacgcgacctgttcgtttttacatagaaacgaacacttcgttggaaacgcattcaaaagacataacttcattagatacatttgcaattgaaaatacgagccttaaaattgcaattgaaaaagcgaaagcttctattctctatcctccaaacggtatgcatactttactactgggagaaacaggggtcggaaagtctatgtttgcttctttaatgcacgaatatgcaattgaagttgaacagcttccaaaagatgcaccatttatcgtatttaactgtgctgattatgcaaataatccacagttactactcgggcaattatttgggattaaaaaaggagcttatacaggagcaagtgatcaaaaagggttaattgaaaaagcacatgaaggaattcttttcttagatgaagtacatcgcctgcctccagagggacaagaaatgcttttcacctttattgaccgcggagtataccgccgccttggagaaacagagaacgaacgtaaagcacaagtattaatcattactgcaacaacagaagaaccaaattcatttttattaaaaacatttacaagacgtataccaatgactgttacgctgccaccacttcgtgagcgtacacataaagagcgctttgctttactacagcgatttttcacaaatgaagcaattcgtctgcgaaaagacattcacgttagcccaaatgcaatgcgtgctttcgtcttttacaattgtcccaataacattggtcaattaaaaacagatgttcaaattgcctgtgcgaaagcctattctgatttggtcacaaagaaacgtgattctgtctatgtttcaagttcagatttaccttggtatatgaaagaagggttgttcattgaaaggaagagccgtcacttataccaaataccaaatgaaacatttgtatttacaggtgaggaaggttggagtaatcataaaacagaagatgaaaaacgctcttctatttacgattatattgattataaatacgaagaacttcaagcacgtggtattgaagaggaagaattagaattactaatagaaaatgatgttcaaagctttttcgtacaatattttaaccaaatatcaaaaaaaacaagccatgaaaatgtttttaaaattgtggatcgtaatatcgtttccgtatgtgaaaaaatagcggaacttgctgaaaagcatttatctaagacgtttgatgaaaaagtatttctcgctttaagtttacatgtacagacaactctacaacgtttacaaagcggcaaacaaatacatcacccacaattaaatcaaattcgtacgaaatataaagaagctttttccgtagctatgcaatgcattcaactactggaggaagaattacaaataacaatgcctattgatgaagctggctttttaacaatgttcttcgttgttgatccaattcctgcctcacaaacagaagtaaaagtattaatattagcacacggtaatggcatcgcaactgaaatggcaaacgtcgcaaacgaacttctcggcattgaggaagtaaccggtattgatatgccgttacacgaatcaccgaaagatttcttggaacgtgtgaaagtgtatatgaaaacactacaaaatgtaaatgggcttctcttacttgtcgatatggggtcacttgcttatatcggtgacatattagaaacggagttcaaaatccctgtacgtgttctctcgatgacgagcacaccacacgcactagaagcagctcgaaaagctcagctcggttattcattagatgcgctgtatgaaacagtaaaaaatttaacaccattttacttaaacgtacaagaagaaaagaaaaaacctctctctccaatgaaatctgttattttaacagcttgcttaactggtgaaggaagtgctttagctattcaaaaaatgttagagaactatttacgatttgataaagacttaattgaaattattccaattagtatcgtccatgaaaaagatttaacgaaaatgattgagaacataaaaaaagagcgtaacatcatttgtattgtcacgaatttcgatgtgcaagtaccatgcttaacatatcatttccaagacatcgtaaactacacagcgattcagccaattcaagaattaattacgtatgaagaaacatatgcaaaaatggcggatattcttgaacaacaaatgcagcgtaacgatggagcattacttatcaaaacaattcgttacgcattaaatacaattcaggaattaatttccttacagctaactcctgatagcttaatgggtgttattctgcatatgagctgtatggttgaccgtcttcaaaaaggagaaagccttcttcctcaccctgataaagagaaaagaagacaagatgagtactggatgtatatgaaagtaaaaaaagcgttgcaaccaattgaaaacacatttgaaatacaaatacctgatgacgaagtattttatgttatggacttctttattaaaaatcagcctgtgaaaaattaatcgaggccgtttttaaaaatatcgatcgtaacgtgagttatatcagcgattttcaaaatatatcggcgcaacccagattatatcagcgattttcaaaatatatcggcgtaactcagattatatcagcgattttcaaaatatatcggcgtaactcagattatatcagcgattttcaaaatatatcggcgtaactcagattatatcagcgattttcaaaatatatcggcgtaactcagattatatcagcgattttcaaaatatatcggcgtaactcagattatatcagcgattttcaaaatatatcgatttaccgacaataattgctaaaactagcaccttatataatgagaaaaggctgttccaacatatggacagcctttgcctctatttctttacttttctaactcgccctcttatttctcctcttttttgtgatttcgtatggacattaacatatacatttgcttgaataatttcttgaagtaaatgtacgaatgatttcccttgtaaaggtccctcaaaatcctctacattcactacaccagtaatacttccctcgttcaagctaatcccttgctccagtggaccatacaaatataaaacaacaggaccaatttgagtagacttccctaaatgaatttgacaagatgtaaccttttctatattttttagtattactctgtaatgcaatttcgttaaatcatcactaaaaataaactctgctaccccaaaagcttctgtatttacaggaggcacttccctcttacctgttaacctggcaaagaaatgtgttgtcataaggcattctccttatataaatttcccagcactacttctactactttatggtttaaacataatcatttatgactttttcaattttaattacaaagaaaagattcacaaaatctttacattgtgattgttcctgtagattgaaagtctcttgtataatgcacatagaaaaacattataggaggttccattgaaaactaacaaatacacttttcatacattattagagatttttctcgtctcatttaaattaggacttacttcattcggcggtcctgtcgctcatctcggctatttccaccacgaatacgtgcaaaaaagaaaatggatggatgaacgaagctatggagatttagtagcactatgtcaattccttcccggtcctgccagcagtcaagtcggtatgggggttggattattacggggcggtctattaggagctattatttcatggattggattcactttaccgtctgtgcttgttttggttttcttcgcctcattccttaatcagttcgatcttggaagtgctggctggattcatggactaaaacttgtagcagtcgctattgtcgctcatgccatatggggaatggcgcgaaagttaactccagatcgaaatcgtgcaacgattgcgattgtaactgccgcaatcgccttattatggccaagtagttggacacaagtcatccttattataatatgtggctttatcggttggtttttatatcgcaaccaaccaattagccaatctcaaaatataagagtacctatttcaaaaaagatagcagtttcttgcctcgtcttattctttggactattactactgctaccaatattaagaccgttctcttattacatcgctttatttgacagtttctatcgctctggcgcacttgtatttggaggaggacacgtcgtgctgccccttcttgaaggtgagttcgtacaaaacggaatgatgacgaaagaacagttcctagctggatacggattaacacaagcagtaccaggaccactatttacattcgcctcttatataggagcagtgttaaacgggacgcttggggcaataatcgcaacaattgcgattttcctccctgctttcttactcgttattggtgttttaccattttggaacaatgtgagaaaaatatcattcatacaaggcgcactacttggtgttaacgccgcagttgttggtattttaattgccgctttttacgatcccatttggacgagtacaattataaatgcttcagatttcgttttcgcttcgcttcttttttgcttactagctttttggaaagcaccgccttgggttatcgttatacttggagcttttggcggatatattctatccattttgtaaataaaaaacgacggcatgatgtagccgtcgtttttctattaaaacttcacaagttctatcccttcaggcaactcactctctgttaaaatacgcaattccttcacacgatccattacgtaagaagaacgcttcacaagctctggatcaatataagctggatgaaccataatttctaccgtttgttcaccttgtactctttcttttaacttcataaagtaatcttccgtcacaccatccgcataaaagtcactgtaaaatacatcagaaaatggatgcaccgctctatcttccccacaacgacgaattggaacattatatttagctgctaatctctcaagaacatcgtgtaagatcggtaatccgtgtacatgatgatgactatctaaatgagttggtgttaatccgtaagataggaatttctcaatttgagcagtccactctctctcaacttcttctggatttatattcccttcccttacaacactttgtttatgaaacgatccgtcgctacctacaagtgatggtacgtctccaagaagtggctcccctgctgttaatacgagatgtacgcctactccgagtaggttatactctttcgctaagcgtaccgcatgctctgttcctggcatattcatcatcatcgtcgttgaatttacaagtccatttatatgaccatcaataatgccgtaatttgtaccttctgtaagaccgaaatcatctgcatttacaattaacttaatcatcataatacctcctaatagaataaaaaaagcgggctaaatagcgccgcttttacttctctacctttttaaagaactgtggaagatactctttatgtgcttccaacatttcatctaaaatttgttttgcaactttatctgatggtacaagcggattgattgtcatagcaagcagcgccttatgataatcccctgtaacagcagcttcaattgttgtgcgctcgaatgatttaatttgttgtactaaaccgcgaactggtactggaagatctccaactgcaattggttttgggccttctttcgtaataatacagttcacttcaacagctgaatcatgtggtaagcttgcaattgttccgttgtttcgtgtattaacaggctggatatcacctttattattgtaaatagacgtaattaagctacatgctgcatcactataataagctccgccacgtttttctaattgtggtggtttaatatctaaattcgggtctttatataactcaaataaatcattttctaattgttttactacttctgcacgtgtacctttttcaacagaagcttctttttcttcttctaacatttcacgtgttttgtagtagtaacgatggtatggacatggaatcgcacgaagtcctcgaataaagtctggctcccagttaagcgctgcgatattttccatcgtaatttgtttttctggatctgtcacaagctctaacacacggtccattacacttacgccatctaagtatacatctagtccgtataccatatgatttaaacctgcgaaatcaacgtgaacacgactcgcatctacttcaagtaatcttgcaagacccatacgaattccgattggaacgttacatagaccaactactctttgaatatttgtataacgaagaactgcctctgttaccataccagctggatttgcaaagttaattaaccatgcattcggacagagctcctccatatctttacaaatatctaaaataacaggaatcgttctcaacgctttaaataaaccaccaggaccatttgtttcctgaccgattacatcatattttaatgggattgcttcatcttttgcacgtgcttctaataaaccaacgcgaagttgtgttgttacgaagtctgcatcttttaatgcctcacggcgatcaagcgttaaatgtacctcgattggtaaacctgattttttcaccatacgtttcgctaagttaccaactatttccaacttttcttttcctgcctcaatatctactaaccaaatttcacgaacaggaagctcatcataacgcttaataaatccttcaattaactctggtgtataactagatccaccgccgattgtagcaattttaattccagtcatgctttattcccctttcgcttcaagctttttataaagatcgataaactctgctgctaattctttcactgtaatcgcattcattaaatgatcttgtgcgtgaattaaaagaacactaacctctgttttttctcctcttgcttctgattgtatgagctctgtttggaaatgatgcgcttcattaatcgcttctttcgcctttaccatcgcttcatctgcttctaccattttcccctgtttggcaaattgaagtgcctccatcgcaaagcttcgtgcgttaccactatttaaaatcaattggaatggaatttgttctgctgtagtcatcataattaccgccctctctataaggttcaaccgatttaaataccccttcagtttgaacatgtctattaaattattattttatgaatgatagtttggtgttcttgtagatgagtatcatctttttgaacatgatataaaggtaattattctgacgagctataggaactcgccagaataatattttttaaagtgatactgaattgtcgcttccttttgtttcagcttttgcagcctgtacataagtacggtcacacattaatacgaatggatagtaaattactaccgcaatagcaaagttcaccacttgtagtgctgcaccagcgatgcttccgcccgatacaagataaccactaaagattggtggcattgtccatggaactaacgcaactgtttttggtacccatcctaaagtgattgctgtataagaagtaataactaatacaactggtgtaagtacgaacgggataattaacgttgggtttaatacaattggcgtaccgaaaataactggttcgttaatattaaagaaaccaggaccgatagatacacggcctacaccgcgaagctgcgcacttttcgctacaagcattactgccactaagaatgctaacgttgcacccgatcccccgatatatacgtatacatcaaagaatggttttgtgaagatatgcggtacgtcatatgcagacataccatcattaaataatttcatatttttctctaatgctggtaaatagattgggtcaataatccccccaataatatttggaccatgtaatccgaagaaccataatacgtgaataagtagagcaataataattgcacttggtaatgtacccgctaaaccttgtaatggtaattgaattgtttcaaataccattttatgaatgcttgttcccgcaagtttcacagctaattgaatacctgctgttacaatcaaaataacgaatgctggaactaacgctgcgaatgatttcattactgccggtggaacaccatctggcattttaattgtaatatccctttgaacaaagaatctaaacacttctgttacaagaagagccactataatggaaacgaatagaccttgtgcccctgtccacgctaaatcaataccgccttcttttggcgttgtcggagaaataataattaatgcaccgaatgtaatgattgctgctgacaacgcatcgacgccgtaagatttcgctaaattgtaacttatcccaactgcgactatgagggcgagtatagcaaaggaaccagtccacataccgccaccgacatctttccaagcgtcaccaaatgtgcccttcataaagttttggaaagcatcaattggtaagttatttataagtactgcaaatgatccaactaaaataagaggcataactgcgataaatccgtcacggattgcaactaagtggcgctgcgatccaattctacctgcgactggaactaaatatttctccataaatgcaataaacttttgcatttcgcttcccccctaattattttttaagtgttaatgcgtgatctaaaactgcttctccattcatcatgccgtagtgcattggattgataacgtcgattccaacatttttctcgtcagcaagcgttttcattgaagagagcatgtaacgaacttgtggtcctagtaataacacatctgcttgatcgatattcgtttttactgcatccccagatacagcccaaatcttgccttctagaccgcgagcttttgcagccgcttccatttttgtaactagtaaacttgtagacatccctgctgaacaacataataaaatattcatttgaaaatcccccttgtgtagtataaaaaatttatgtttatttatttttctttacgctatttattaatgcaattagcgtgccaactttttaaaaccactaaaatcagtgctttttcgagcattttctttgtgtgttaacgctttcaattagtgtgtcgtccaaaaaatacacagtgtgttataaaacaacacgcttttaacacataactgtatgaaaatagattagtgtttagtcgtctagttgtgtttaatatgaaaaaacactaaaaaaactttttcaatgaaaaataattcattattttaacccactatttagtgaaataaaaaaaccttgcataagcaaggttcattcatccaccgacatcttcctatataactctacaaactcactcgctaattctttcaccgtaattgcattcattaaatggtcttgcgcgtgtaccattaaaagagtaacttcggtcttttcgccaccagcctctttctggataagctccgtttgtacgcggtgcgcctcctttaattcctctagtgcttcttgtaatttagcttcagcttctgtaaactccccacgcttcgcacaatcaattgcttccattgaacaacttctcgcgtttcccccatgcaagattaaatgaaaagctttcgtctctatcgtatccattgtagttctttactcccccttttcttccgccagtttttgtttatcccatatttttaagaacggtaaataaatgaagaatgctagcgcaaagttaacaagttgcaaaataacacctgaaattttcccgcccgatcctaaatatccactaaaaagaataggtgtcgtccaaggtacagcggccccactcggacgtgcaacccatccccattccattgcaaagtaagaaacaattgttagcacgactggaactaatataaatggaattagtaaaagtgggttcatcacaatcggcataccaaaagttaccatctcattaatattaaatataccaggtgcaattgacaatctccctaaactttttaattgttgacttcgtgcaaatagtaacattccgacaactagagcaagcgttgcaccagaaccgcccatataaatccataagtcaaaaaactgtgccgtaatcgtatttggtacatcttgcccagcttgaaaagcaactcggttttgatccattaacgacaaccaaacggggctcattacaccaccaacaatagtagcaccatgaattccacaagaccaaagaacatgaacgagaataactgctattatcgcgccccaaagactagcaccaagtacactaagcggttcctgtaaaatttgtcctacaatattatggatactgccaaaagaagtattttctataattaagcgtaaaatccaaataactgttacaacaataaatcctggaacaagtgctgcaaatgaacgcgtgacagctggtggaactgtctctggcatctttataattatctttttttgtacaataaaccgataaagttcagtagatataagtgcaataatcattgctacaaataacccttggcttcccattaatgcagctgggatagcgccttctacaagtacactttcttttgtacttggtataatatatgcaacttgaaatggagtcgcaagtaaaaacgtcacaagcgacaatgccccggatgctaaagcatctactttataatactctccaagtctgtaagcgattccaaaaacagctattaaagccattatattaaaagttgcactaactggataccctaaagctcgctgccaattctccccaaacaaacctgccataaaatcgttatatcccggtatcggcagtgcactaataatgaggaaaaacgatccaataattaagaaaggcatcgttaaaataattccatctcgaattgcttgtaaatgcctctgctctgcaaccttccctgctaccggcatcacatacttctctaaaaaccgtatcatctatcccactctcctcatggtttcattaacaaagctgcttgcaagatagcttctccattacaaagtccgtaatgaacagattgaatgacatcaacaggtatccctttatccttacatagttctttcattttcggtaataaataacgtacttgcggtccaagtaaaaggacatcagctttatcaatatgactattcacttcagaacctgatactgcccagattgttacttctatccctcttgcctctgctgctttctccatctttgtaacaatcaaactggaagacattcccgctgcacagcaaagtaaaatatttatcccgcttccctccccctttttctctacctaagttatggtgcatcccttgccaccactaggttacaaatatatatgtctagatttcctgctgtatgccgagcttaaaaacaaaaatttcttcgttttcacgctattccatttatccgtattctcctagtaaagaggacgctaactcgctataataattcagtatgatttttttaattgataggaggatatatttatgaaggcatatcgctttccacttattttgttatcttctatcctaattggtggtttcattggttatttcatgggtgccgatgcagttgctttaaagccgcttggtgacattttcttaaacttaatgtttacgattgttgtacctctagtgttctttagcatcgcatcgtctattgctaatatggatggattaaaacgtttcggtaaaattatgtctagtatggctgggactttcttatttacaagtattttagctgctatttttatgattattgtcgtgaaagtattcccgccagcacaaggtgttgtactagaactaacacaacctgacaaagccggcaaagctgttagtgttgcagatcaaatcgtcggtattttaacagtatctgacttctcgaagttactatctcgtgaaaatatgttagctcttattttcttctctatcttaatggggattgcaacttcagcagttggcgaaaaaggaaagccatttgctacattcctacaagctggtgcagagatttcaatgaaggttgtatctttcattatgtactacgctccaatcggacttgctgcttacttcgcagcattagttggcgaattcggaccacaacttcttggaacttacttccgagcagcaatggtatactatcctgcttctctcatttatttctttgtattcttcacattctatgcataccttgcaggtcgcaaacaaggtgtacaagtattttggaagaacatggtctctcctacagttacatcacttgcaacttgtagtagtgccgcaagtattccagcaaacttagaagcaacaaagaaaatgggtatttcttcagacgttcgtgaaacagttgtccttcttggttctactcttcataaagatggctctgttttaggcggcgtattaaaaattgctttcttattcggtattttcaacatggaattcgaaggaccgaaaacattagcaatcgcacttgttgtttctctattagtaggaacagtaatgggcgctattccaggcggcggtatgattggtgaaatgttaatcgtttctttatatggcttcccgccagaagcattgccaattatcgcagcaatcagtacaatcattgatcctcctgcaacgatgttaaacgtaacagcagataacgcttgtgccgtaatgacagctcgccttgtagaaggtaagaactggatcaaaaacaaatttgcttaataaatagaaagaggatgctcgttttgagcatcctctttctttgttgttaatccattccgccacaaatttgttaaaaccttcacaaatattccacacctcttatccattctccgtactataatcatgtatggaaaaggagatggacacaatgacacaaagcgcaccagaatttaaagttttgcaaagcattgcatttctcgctgtcgttttgcaaagttctttattatatacaatgaatcaaggaaatgtcttacttgagcaatccctcattatgggcatgctatttaatcttgcaaaattctcagcaccagcattcatatttatcgttggatttcacttaattcgtcactatacaaagcaattagtatataaagaatatatttccgaaaaagcgatacacttactcattccttatttcttttggtctattctttacttattaacaacaaataatcttattacgttacaaagtggaataaaaagtttattactcggaacagccgctccccatctttggtacgttattatgatgttccaaattcacttattgttccctttactatgcacacttttttattggtttcaaaaacgaacagaaaataaaaaagacatatataaatatatgacctttttcgcttgcctatattttctattaatgtggttctcttctcactatatttttaatggagaaaaattaacaagttcaacaattttacattatacagatcgatcatttctattctactcattctatttcgttatgggcggcattgccgctgtagcactaaaaacttggcgtctattcgtcatgaaacatatcccgcttataacaatattatttttcatcttatttttattcatcaattatgagttgtttagtttttacggagcaaactctattcatttaactgtttctacctatttaaaaccatctatgtttttatatatcgtatgcgaaattatcatactgtatgtgttatctattatgatagtacagcgtcgtggtttcttatataaaacgttacgtttcattggtaattacacgtatggtgcttatttagctcatttattcttcttgcaactatgcacaaaacttctttccttattcacactgcaagaaaatactatattatatgccctattactatttgtgttaacggccattatctctatttcaacaatggtcatttgtagcacaataccatttcatacttggattacagggccttctcctacaacaaagatgaaatggacgaaggttgtattacgaaaaaatcataaaaaactattcaagccatatatttgatataataatacgcatataaaaagaaagcgagagacacctatgattaatcaagttggacaaattatgctatatgtaaataaccaagacgaaacagtacaattttggacagaaaaagtagggttccaaatcattgcggaagaaaataacggaaacggattccgctggattgaaattgcaccggcgaaagaagcaggaacaagcatcgtccttcacgataaagcgttaatcgcgaagatgcaacctgaactaaacctaaatacgccttcacttatgttcttctcaaatgacttagaccgtctatataaagatctttctgagaaaaatgtcacagttggacaggttgtagatttacctactggtagagcattcaactttgctgataatgaaaataattactttgcagtaatggaacgcaaataaaaaataagctatccgaaaaaatcggatagcttatttcattttaagaaacttgttctgcattcgtttctctatgctgtatatgactcgtgatccaagcaattccaccggcaacaacgagataacataacaatattaaaatttgcatttgtaattgcgaccaatctcctaaagaaataacatcttgtaatcctctaagagaatgagacattgggagaaactgtccaattttgctaagaacagctatgtttaattctcctgggaaagtacctccgctcgtcgctaattgcaggacaagaagcgttaccgctaagaactttccaacaagaccaaatactgttactagcataagaataaatgtcataaacgtaaaggaaataacaatacttgataaaacaaagagtggcacacttgcgacttctaatttcataacacctagcacaactacatctacgagtagcgcttgaatgagtccaattaaatataccaatcctagtttattaataaaatgtaccgttccgcttaccttcatgttttgtctgcggccaagaggtaaaatattcgatgccataattccgccaacataaaatgcaagtgataagaaatatggtgcaatgcctgaaccgtagttaggaacgtcagaaactgttgacttcactaactgaactggctctgagaacatcgtattgcgtgcatcatcattacgaacatccgctatcttctctgcgccctctcctaatttcgtagaaagttctttcgcaccatcatcaagtttaacaagtccatttgttaatttactagcaccgttattcagctccgttccaccactcgcaagctgatttacaccttcttgcagggatgtaaatccatttccccacttcataaatccatcagccaaattcgatgcaccatctgctatctttttcgttccagcagtagcttcatttaacttaaatccgaatgtattcatgccttcttcaatcttatgttgaccatcagttagcttcttcgcaccttgtgtcaattgttgttggctattatttaaagtacttgttgctttagctagtccattagacgtagcaacaattttttgaaaagcgggatcttgctgcacttctggatgatttttcacgtactcttctaattgttgtttcacactattggccgccccatccgcttttacttgcccttcagcaagcttctcacttccgctcacccattcatttgtaccagcacttaattcactaactcctgattgtaacgttttttcaccttgtgctaataactccataccactatgaagtgatgtcgctccttgactcagctcatttgctccccccgttaaggcagattggctagacgcaagcttgtcacttccttctttcaatttcgatgtcccgtcacttaaacgatcaataccattcgcaagctgattcgctccattttttgcatcggtcgttccttcatgtaacttctcagcaccattacttgcatcactcaacccttgtgccaaatcttgaaactttgaaaaaacaccttctgtatatgatttcgtaatactgtttgagatttttgttttcatattttcaacagctgtcgttccaatttgagccgctacaaagtttttacctggatttactttgtactgcaactttgctggctctggtttctcatccataagtgtacttacctttttagagaaatcttccggaatcgtaacaaccatataatatttatcttcttttaacccttcatccgcacttttttctgatacgaaatgaaaagccaattccttattctcttttaaatttttaacaaaatcgtctcctgcatgaattgttttttcatccatcgcagcacccttatctaaattcacaaccgcaacaggtaatttatctaattttccgtacggatcccaatatccagctaaaaagaatcctgaataaattaacggaacgattaataaaaaaattaaagcgatacgtccatgtttatggtgccacatcgctttccaatctttaaatataagtttaattcccttcatgaaacatactcctcttctaatttaacacccttcgaatggtttaacagatttactatacacgtcactttacatactgtataatacatctttaattattaattcattccttttggtctatagaaaggagactcgaaatggaactgctccagttaaaatactttcagacagttgcacgactagaacacatgacaaaggcagctgaagaattgcatatcgcgcaaccttcactcagcaaaacaattgctagactcgaaaaggatttaggagtccctttatttgatcgccaaggccgacagattactttaaattctttcggaaaagtatttttaaaacgagtagaacgtatttttcatgaattaagtgaaggagaacgagaaattaaagatttagccgaattacaacaaagctctattacactggccgtttctattccaagaatattaccagaactacttggctcttttttactagaacatcctaacgttcgattccaacaatttcttgcatccactccttctatgaaacgacaactagataatatagaaattgacttttgtatctcctctgtgccaattgaaggtgaggagattgtttgggaaccacttattacagaagaaattttcttagtcgtcccttcaggccatcgtttatcaggccgaaaaaatatccacctgcatgaagtaaaaaacgaaccgtttattagtatgaacactggctatggatttcgacacttaacggatgaattttgcaaagaagctggtttcactccgcatattgcttttgaagtagatgaaccgaccgtgattagcgacctcattaagcaaggtctcggcatcgcttttgttccaagtttaactttattaaaaaactctactttagcatcaagcaagttgcgtattattgaacccaattgtcagcgaaccatcggattaagttggtcaaaaaaacgctacttatcaaaaacagctcagcaattccgtgaattcgtgattgattacttctccaacattaggacgtaaaattatatcaacaaataaaagttgccaccctcatatggtggcaacttttattgttcactcttttttaattccatttcagctaaaagtggtagtacattatcaaaaatatgcgtattattattttcacctgttacatatccaccataatatctactaaatacgttatcatttcggaatgtggccatatgatcatacaattctttcgcaaactttttatcacctgtttgtagtacgtacaaaatcgttaatccgtatgcggctggcgattcataattcacagtttgttttcccgtttctaaattgtaacgaccgtatagctttccatcctcctggaatttcttctttataaattccaaataagcagttgatgaaagaccacctaaacttcgatgatatgcaacgtatgattggtcaataagattcacttctttatcgtacgtaaatgtaccatcttctttatactctttcgggaatgcccagccatgccttggatagtccgctaaaaattgaacgacttcctgatattgctgagcagaaactttgtcgtacttcttcatataggagaatgcacgtggatttatgtatgatgttgttacaaaattattttgtttccctgcatctgcatcataataatcaacataataattatcttttttattataacgaagtacagcatcacttaattgatcggcaaggtttttataacgctcttccttatacatttcataagcacgatataattgttctataatacgaagatcatctataagtgcatttgtagctgactgcctctctcccttttcagagagtttccataaaacgatatgattcttatatacgaaattatcttgaataacctttacttgctcatcaaataacgcctgatcatctttatcaagtgtatattgtaaccataatcccgctgattctgataaagcttcacgtccctttgcttcacccgtacctgccttagtatctactaaacggtacgtggcaagcgttccattgtcattcaccatatgtcttaaaataaaattttctgtacggtttccttgtaaagctgaccaaaatacaattccacctaaagcgatcaagaagataattccaatccctatatataaacgtttccgcaatcttttcacctccctagtaaggctaaccttaattttatcagaacatacataaatttaaaaagacaatccactagattgtctcccccatttctatccctcgtaaacctctttagaaggtttatatagcgattgtacaagccgatcatattcacgacgtgtaatctctttattatatagcttcaataataaatctctatgctcttttgaaaatgccatctttttaatgacttcaggatacataaaacaccctctccatttcacataaacttcttcttttcgaaaaaacagaacttatgttcgcataaaagattataaaagattcctgtaaaaaaaacaaacaaaacatgagaaactatttatttctttctattcaaaatattacaacattatattatcatattcactttttaaatacatatatatttttggtagtttttttgaataaatcttccaattcaatcagaaaataatggcaaaaaagaagaggagtttacatatggatacggtaacattagcaagagcattttttggttcttcattagcattccacattatttttgcaacacttggcgtcggactttcattgatgatttttataagcgaaatactctatcactggaagaaagactccgactatgccattatggcgaaaagatggacaaaggcgtttgctattcttctcggtgtagcaattccaactggaacaattgttggtgtgcaaatctcacttctttggcctggtttcgccaaaattgttgggcaagttatttctgttcccttccaaattgagattttcgccttctttttggaggctttattcatgtcgatttacgtatatgcagctgataaacttcctccatttatgagattaatctcgctatttttcgtcatgcttggtgccacggcatccgccgtgcttattacatcagcaaatacatggatgaatacaccagcaggcttttcaatgaatccagatggatctgtttttaacgttgatccgtggaaagctttctttaatccaagttttggcacaagtgcatttcatgtcgttattacggcttatgcaaccggtgcagctgtcattgcttctattgctggatttaaattattgaagaaaaatttaagtacacgtgaaattgcttatcataaaaaagggctgctattagggcttgtcgttacatttattacaggcgctacgatgtggctttcaggacatgaatcagcgattgccttacataaacactcacctgaaaaacttgcatctgctgaagctttatttgaaacgacatcacacgcaccgctatccattggcggagttgtggatcctaatacacttgaactaaactatgcacttgaaattccaaacatgcttagcttattagtgggactagaccctagcactgtcgtaaaaggactaaacgaattcccacaagaaacatggccaccattttatacacatacactattcaacttaatggtaggaactgctgcgtttacctttgctgttgcaacaattgcactcttatattggtatttcgtgtaccgaaaaaagggaacagaactaccgaagtggctactttggggggctgccgcatgcggaccaattatgatgctcggtattgaattcggatggattttcagttgtagcggtcgtcaaccatggacaatttatggtatgcaacgtaccgtcgatgcatctacacgcgctgatttcgtcggtcctttatttgttttgttcatcattttgtatattggactcgctattttaacagtcattgttctacggacattctttagaagacatccattaaagaatgatttacaacaccaaggaggcgattctcatgtatgaggaaagtattgcaatcatcatcttatgggcccttattttcgtatacagtatactagggtccattgattttggcgctggtttttggggcatggtatacgcaaaacatccgacgctcgctgctaaacttgcgaatcggtacttatcaccaacttgggaagtaacaaatacgtttcttgttttcgtcgttgtcgcatttctcggcttctttccgaaagcggcctttactcttgcgacagtaatgttcgtaccagttatgttaattttagtgctcattgcagtacgtagtacatttatggtatttgcttactccttgccaaaataccaataccttcttcgggttatttcaggtattactggtctattaattccagcactattaattaccgttttacccgttacagagggagcctatattacaatgtctgaaggaaaggaagtactcctatatggaaaacttctttctagcccagttatctactgttatatgctcttcggactaacttctgaactatttctctcctctctctttcttgctgatttttcgagagaacaaagttcagaagatacgtatagaatttatagaagaaatgctatcatccttggtcctgcaacgctcgttacggcaattattgccctcgttgtaatggatccagaaacacattgggttatgcaaggattaataaagcaattcccgtggtttacagtttctattgttttattcgttatcggatactcgtccctttggtggacaaacaaaaagtacaatacactaggataccctcgcattgccgttttagctgtcgtcgctcaatatgcatttgcaagctatgcttacggggtcgcgcatttaccgtatattatttatcctgacgtaactgtatttacaagctttacaacgaaagaaacgttctatgcactgctcattctatacgcaattgggattgcaattttattaccaggatttattttcttctggaacttattcttgaaggatcgtacttttttgaaggaaaaataatatagcattggagtctgttccaaaaggcattttaggatagactccttttgtcgtgttttgtcgataagtcgatatattttaaaaatcgctgatatattttgagttgcgccgatatatttcaataatcgctgatatattttaacttgcgccgatatatctcaataatcgctgatatattttaacttgcgccaatacatctcaataatcgcccatataaatttcatttactatcttactgccccaataatttatagactcctctcataatagttatttcactattcgtgacacctgtcctttagcatgaaaaacacatattcggttcatctcgttatacgtctagttcttcttattttttgctgaatatactaccaatataaacttgagacaagctacatctgttcaagggaaaatagaaaggtaggcaaaatatgagcattgaaatatggattactattattgtatttttcttaacgatgatcgttatcttttggcgaccccgcggcttaaatgaggcttggccagcagcaatcggagctggtatcatcataattactggacttgtatcaaaaccagacatcatggatattataagtaaaattggcggtgcctccataacaatattagcaactattgttatggcagttatattagaaagcttcggcttcttccattggtccgcagcgaaactagcaaatttagcaaagggttctgggcgccgcttatactggtatattcaattattatgttttcttatgactcttttatttaataacgacggtagtattttaattacaactccaattttaattcttcttctaaaaaaccttcaattaaaaccacatcaacaaattccttatttattaagtggtgctttaatcgctacggcatctagtgcaccaattggtgtaagtaatatcgtaaatttaatcgcattaaacatcgtccatatgactctttatatgcatactgctatgatgtttgtacctgcaacattaggcttattatttatgtcatggctcatgtatacagttttgaagaaaaaacttccgaaaaaattacctgtttcttcatatgatattgaagaaattttcttcacgaaaaacttccatccactaaaaggaaataattctgttgatacgaaacaaaaacggacaagattcatgttaaaagtattaggtttcgtcttcctgatgcgctgtcttctattcgttgcatccttcttatccatcccaattgaaatcgttgcagtacttggttcactcgttcttctcatttggagatggtactacttacgaacaaatcctgtcgacattttgaaaaagacaccgtggcacattttaattttcgccttctctatgtacgtcattatttacggactccacaacgcaggattaacagctgtacttgtacaatggctcgagccaattgtgaatcagcatctactctatgctagctttgcgatgggcggacttgtatccatcctctctaacgtcttcaataaccatcctgcccttatgattggtacaatcacattaacagaaatgggactagatccagtcacattaaaaactatctatcttgcaaacatcattggtagtgacatcggttcactattactaccaattggtacgctagcttcactcatttggatgtatattctgaaacaaaacaaaattaaagtaaaatggaaagactatttaagtgtatcccttatcgttatcccgctcacaacagtcgtcacactatttctcttattctactgggtacatctcttctttgccttataaacaacagaagccccatttgctaccgtcttagcaaatggggcttcttctataataaagttaggtactacagtgtgatcaatcaagtaaagaggtgtaacatgttattgatataaatgactaccagcttctttaaattcttctgctttctctttcattcctttttcaattgcttctttcgtttctaaatcattttcttttgcatattcacgaatatcatgtgaaattctcatactacaaaacttcggtccacacattgaacagaagtgagctgtctttgccccttctgcaggcaacgtttcatcatgatattccatcgcacgttcaggatctaaagataaattaaattgatcgcgccaacggaattcgaagcgtgcttttgaaagtgcatcatcacgctgatgagccgttttatgtcctttcgcaagatcagccgcatgcgctgcaattttgtacgtaataacacccgtgcgtacatcatctttgtttggcaaacctaaatgttctttcggcgttacataacaaagcatcgctgttccaaaccagccaatcatagcagctccaattgcagatgtaatatggtcataacctggtgcaatatctgtcgttagcggcccaagtgtgtaaaacggcgcgccctgacaaatatcaagctctttctccatattctctttaattaagtgcatcggtacgtgtccaggtccttcaatcataacttgcacatcatgtttccaagcaattttggttaattcaccaagtgtttcaagctcagaaaactgtgcttcgtcatttgcatctgcaattgaacctgggcgtaatccatctccaagagagaacgaaacatcatactgcttcataatttcacaaatctcttcaaaatgagtgtataggaagttttctttatgatggaataaacaccactgtgccataatcgaaccaccgcgcgaaacgatacctgtcgtacgctttgcagtaattggaatgtaacgaagtaatacaccagcgtgaattgtaaagtaatctacgccttgctccgcctgctcaattaacgtatcacgatatacttcccacgttaaatcttctgcaattccgtttactttttccagcgcttgatagatcggtacagttccaactggtacaggcgcgttacgaataatccactcacgcgtcgtatgaatatttttacctgtagataaatccataatcgtatccgcaccccagcgcgttgcccatgtcatcttctctacttcttctgcaatcgaagaagatacagctgagtttccgatattcgcgtttaccttcacatgaaaattacgcccgatgatcatcggttcagcttctggatgattaatattcgctggtaaaatagcgcggccttctgcgatttccttacgaacaaactccggctctaccccttcacgaatcgcaacgtattccatctcagacgtaataatgccattacgtgcatagtgcatttgcgtaacatttgcaccttgctttgctctaagtggctggcgatccatttgcgggaaaacaggtgtatgtttcgaagctactctcacaccgtcatcctctggtttcacttcacgcccttcgtatgcttctacatcaccacgccccataatccaagagtggcgcggcgttggaattcctttttccaactcgaccttatacgcaggatctgtataaggaccgctcgtatcatacacacggattggtggatttggaacgccattcgtttcgctttgttcaatctcacgcatcggcactttcataccttctcgtggtccatccacatatactttcttactccctggtaaactcgacttcaattcaatttgctcagctgaaacagattgtttcataaattttgttgcccccctgttcgtgacaaggacaagatatggccagcgcatgccaaaataaaaagagccaggtccataaaaaaataaggacctggctcataaagacatcattatgtaaagccgttaacttccctacgctggtacgagccagatcaggtccaaagggttaagaagttcacgcgcttctctctcagcctacgcatacgttaggcacccctagtttatcactgatttaattttcaatactttcccatcatacacgataatctgaaaaatgaaaagtttatttcttttgctctttacggaatcatccacgttaaataatacgcctgcacatacgtcataataccaacaataattacgaagaataagctatgcttcactgtaaaacggaacaaatccgattcttttccagcaagaccaaccgccgcacaagcgatcgcaatcgactgcggggaaatcattttccctgttacaccgcctgttgtatttgctgcaacgagaagcacttcagatacgccgacttgctgcgctgtaatggcttgtaaatttgagaacagtgcattcgcagacgtatcagaccctgttaggaatacgccaatccagcctaagaatggtgagaagaacgggaatagtccaccagttccggctaatgctaacgctaacgtggaagatagaccagaatagtttgcgataaatgcaaaccctagtacgaatccgatagatagaattggcatttttaattcgcttaacgtttctttaaatgtcactactgcatcttttacattcattttcaaaataaacatggaaatgatacaagcaattaaaatcgctgttccagttgccgataatacatcaaacttcaaaattgcctcgtaaggcattggtttatttacaattggctctgctttcattactaaattatgcagacctggaatttcaaacttaaatacaagactttctaaagcccctcctgaagcaaatagtgccttaaagaaactttggctccaaatgactaccataaccgttaatacgataaatggagaccatgctttcactacttttccaaacgttaatttcggcatcgatgccgctgtcgttgttactgctacttcactatttgctcgcccggattgataaatttctttcggctgccaaacttttaagaacagcgctaaactaattaaacttacaagtgctgatgtaatatccggaagttctggccctaaaaatgtcgctgtaatgaactgcgtaatcgcaaatgaactacccgctacaagtaacgcaggccacgtttgtcgtatccctttaaatccatccattaaaaatacgataaagaatggaacaaataatgataggaacggtaattgatgcccagccatttgtccaattttatgtggatcaatacctgttacttgtccagcaactgtaatcggaattcccatcgctccgaacgccactggtgcagtatttgcaattaaacaaagacctgctgcgtataaaggatttaacccaagacccgcaagaagtgctgctgtaatcgctactggtgccccaaatcctgccgctccttctaaaaatgctccaaatgaaaatccaattaaaataacgagtagacgatgatcattcgtaatcgataataccgatgcacgaatcacatcgaattgacctgtttttacagaaattttatataaaaataccgacataatgataatccaagcaattggccataatccgtacaagaaaccatatccggtcgctgccattgccatcgtgaacggcattttataagcgaataacgctactaaaactgtaagtacaactgtaataaatcctgccacataccctttcatgcggaaaactgctaaagctaagaaaaaaaagataatcggaataagtgcgaccgctgccgaaatccaaatgtttccgaatggatcataaacttgtgtccatgtgttcattgttctctccgatacgataaacttaactaaatctatacaattcaatcaaatttacacgagttagtgcttcatcgtgttctcgcaaccccaaagggacgaggggtataacactccacacgaggcagtatcgttacctcctattatcaagcatttattttacccatcttgataaatttatcgcagcattcaaatctctatcgtgatggctattgcatgaaacacaacaccactcacgtatttttatactccattgtccttctggttgaactgaatggtcgtattttactccgcaacatgaacaaatcttgcttgaggcgaaccatttatcagctttttcatacgcaatgccgtacttctcgcacttgtatgacaaacattgaaagaagaagtttaatttttgaaaggaaagtgccttcgatagttttttgttttttaacaggtttgaaatagataagtcttccacaacaatcctcattggtttggttttcaccaatttagctgttgcttgatggatatggttatttcggatattcataattttcctagataaccgcaggtgctcagctttcgctttttcatatccggcagactgaattttcacaccttttttaaatctcctagacatatctctttgcgctgactttttccttttcaaaagttttttaaccttagcatctttgtttatatttcgttctttcataccattagaagctacaaaaagttcttttaaaccaacatccacaccaatcgactcattcgttagttcttgtgattcaaagtcttcttggaaccctacactaatccaccagtgacgaccatcaaaggtaactcgtggattggatggttttttatttcttggtagttgttggcttgttttcacttctccaatagactgaatatgaacgactttctttcctataaccagtctttcataattggcataaaatccttggattaaatcttttttggatttataagaagtgtgataaccatttttgtactttttgaacgaatgttttctcgccgtatcaaaatcttttgaagcctgtttgggaacttgtgcattaatgtcttttaaccactcatatctctttcgcttcttgatctttgtaaatcgtttctgtaaagctaactgtgaaacagattttccaaatagcttatagtatctatcactcattcttttacaatagttataagcaaatcttgcagcaccagcatggtttctaagcacttgttcttgctcaggcgttggaatcagtctgactttcttcgccaatatcatcagaatgtaactcctttaatgaaagatttgttcttctgaatcgtagcgtgttccaccagcattctcctgagactaccaggatacaaacctgttaattccgatacttgactaactcgtgaaaatttcattattattcttagctcattaaatccaatgtagcacatacgttctatggattcaatgaggtttgatagatttaattaaatttatctcgttcaactaagggcgcaattccttagccagttctcttatgaacttctcatattttcacatgagcgcagactatatgtttatctctttagagatagaggatttttccaccaccataggcttgtgatgtactctcgtcagttatacgagatagtcgttgaacgttcatcttatccattttgacttagatgattcgaggcggaagacccattgttctagtgtttaggatttaaccttgcacgatctgattgattttttctgctttcgcgacattcacgctcaccatttctggtcacgttgtagttcaatcagctttagggattgcccgcagttaaccctcactactagccaatcacttgactagcagggcttactgatatatttaattaactttggttataattggttaaataaatcgtaacagttagttacccccctaaagaatccccttttaaatagaataacctcaccaatagactatcaggtcatcatacctttaagcctaaaataaaaaaacgttcaagaaaacgttttcaacaactttcatttatactgtaccataacaatttctattaaaaaagatttttttgaaaattttattatttaacagaaaatcttacaaaatcgtcacgttcttgtaatgttcatcgataggaagtttgccaaaattattgcataataatagtataacaacagaaattattcatgaggtgatatatatgaacggaaataaaatattagctgcgttatcatactttagtgtactatttgcccctatcttattccctattatcgtttggattgtgggagacgctgaaacaaaaccacatgcaaaacgtgctctatggacacacatcattccaagtatcgctacattcattggcgtaactattctaggaattatgggccttggatctgatcaaccagacgtaacacttggaattggatcaatgattgtcttagctatttgcggaatcatcagcttatactacttcatctggaacattgtaaaaggcattaaagtgctgaaagcttaattttaaacaaatgtttgtttaaaaagggccccttgcaatttgcaaggggcccttttcctaattcgttcactttatcttctgcgtttcttcttttttctcatcattttctttcggcgcgtattcactttatccgctataatgtggagcgtacttgccacaacaattcccattaagaacgttacaatttcaacctcatgcttcttcgcaatttctattaaattaccatccagtgcgactacatttaatagtaataaaaatggagaaaaaacgattaacatgtacgcaatacgaatcacatcaccaagtataatcgtatgcgtaaagaaagatcgatgcggcattactttcttataaggataccaaaatatacgtaagaaaccccatttgttataagcattactgtacgtatctaaatctggtgttaaaaatgaagtacctactaaaaaaccaattgcaaaagttaataaaaaatcaaaatttgttaatccatacgaaaagagcaaaaacaaaacaaccggaagggatattaagtttattttcgtatgcgttcttcctgatggcataatgcacttcctcgcttacgttcgtcctgtcaccttatgacagatttcacctattgacctaatttctgatcgataaatgttgtgtctatatccgaactaaaccattctgccaacttcactcgtgccttatctttcacatcttcattgacgtataacgacacctgtattagtgcggccgttaacgcccctaaatcatccgtatagccaattccagcaatgaaatctggaatcgcatcaatcggtgcaataaaataagcaagtgctccaattacaataattttcactcgttttggaacatcgggtctttgcaaaacgtaaaacagtaataaacttgcataaatgaccgattgccctgcttgctttgcaacatgttttactttcttccaaaacgcttcaactgaaaatttttgtttcatgtaaaaagcctccctatttttaaaaagaaataagctacaatatgttatcagtaaaagtttatggaaattacacaaaacctatcaatgaacttttattgtaacaaacaaaccaaaaaagaacaagtgttcgttaatttttacactatttccttcatataatagatttctagataacccttacccatcttcatttcttatttctcaacaaagaaaattttcacttccacttaacattctgctctacctttgttatattttctagttgacggacatataaacgaatgttaaagttttctctggtagtgacaaatcttatacaaaaaatgtaaaatgttatagtgtttctcagaaatgaattttgttgtataatacagaaatgacgttatgcttatgagcaacaaaagaaaccaaaagggtatgcatagttatagtcgtatatgggtgaatatagaacctttaattatggccaagaaaactatgtattttttattttagcatttttcgctccaaaatcgaccaagcctgatagagaaagggtggaaatgaatgaaagaaaccttgaaatcacaatttcaaaatgtgcgttttactgtattcgtagctttagccttatggctgaaaacttaccttattacacgcacaagctttgacttaaaacttgaatctttcatgcaagaattcattttattccttagcccattagcagcatcattactgcttgttggtcttgcattatttgcaaaagggaaaaaacgtaactatatagcacttggaattaattttgtcttaacaatcgttcttgttggtaacgtaatgttctacggattctacaatgacttcgttacattaccggtgctaggacaaacatctaacttcggaagtttaggttctagtgtgaaagaattatttaactacaaaattattcttgcatttgcagacattatcattttcttcgttctattaaagaaaatgaaaaactttgcacctacagagcgtgtagcacgcccgatgcgttccctatacttcgtatcaacagttgctattttcttcgcaaacttaggacttgcagaagctgaacgcccagaactattaacacgttcattcgaccgcgttatgcttgttaaaaacttaggattatatgtacaccaagtatacgatcttggcttacaagcaaaatcaagttcacaaaaagcattcgctgacggtagtaaattacaagaaacagaaaactatgtgaaaacaacacaaagtaaaccagatccaaatatgttcggtactgcaaaagggaaaaacgtaattgttgtctctcttgagtcgttacaaacattcttaattggcgcaacagttaacggacaagaagttacaccattcttaaaccaatttacgaaagaaagttattactttgataacttcttccatcaaactgggcaaggtaaaacatctgatgctgaattcctagtagatacttctttatatccactagaccgcggtgctgtattcttcacacacggtaacaatgaatatacagcaactccagaaattttacgtcagcaaggatactacactgcagtattccatgcaaacaacgcaacattctggaaccgtaacattatgtatccggcacttggttatgatcgttactacaacgagcttgactacaagattacaccggaaacaaaactaaactggggattaaaagatatcgagtacttcgatcaatctgttgatatgttaaaacaagtgaagcaaccattctatactcgcttccttactttaacgaatcattacccattcacttacgatgataatacgaaattaatcgacgaatacaattctggtgatggcgtatttgaccgttacatggtaactgctcgttacttagacgaagcaatgaaacactttattgagcgtctaaaagcagaaggtatttacgacaactcagtaatcgtattctacggtgaccactacggtatttctgaaaaccataaccgtgcaatggcacagttcttaggaaaagaagaaatcactgcatttgaccatatgaacttacaaaaaacaccgatgtttattcacgttccaggtcaaaaagaaggtaaaacaatttcaaaaccaactggtgaaattgacattaaaccaactattctaaacttacttggtgtagattctacaaatgacgttcgattcggtcatgatgtattctcacctgataataaaggattcgttgttcttcgtgacggtagcttcgttacagataaatacatgtacacaaacagtacattctatgaccgtgctactggcgaagttgtacaattaccgaaagaagaatcccagccactaattgatcgtgcccaaaatgaattgaacatgtctgataaaatcattgaaggtgacttacttcgcttctctgaaagtaataagatcaaaactggtgaagtaaaaacagttattaaagaagaaaagaagagcgctgagtaatctcagcctctttttttattttcttccatacaactacttatattcattaactttaaaattacataacctttaccaaatattcacatagtgttaatgaagaatctctataataaaatatgtaaacgaggttctacatatttcttatctctcatctttcgtaagatcccttaaagaaatgtgtaaatcttttgtttctactttcttataattgtctttcaacttgttttgtttccatacacaaagcattcaacgagacaatgtccctatgaaagatagctaccctccttgtgcagcattccataagaatgttgcttttttttatttaaaagcaggattctcatttcttattttcgaatttgtatatacaaaatgctgtaaagtgaaactttaatcagccctcatcaatcgggcatttacgggcagtgattcgcccacttcacttctttgctctaccggaatttgtaagtaggggctttactgccgttaatgcggggtagatcatccttatttctctatgatttacaaatacatatatggtcatatgtagagaattgctcacataaaaattactatagtgatttttatctcgcatgaatgaaagtttcacgttacttacgtacttacgaaaggatgggacggaaattggcatacgaaaaatttgtactttggaatgatgaagttattgatacaacaaaacaacaaacgtacatagaacttgaagaaagaggttcgcagttcggagatggtgtctatgaggttattcgcctatataaagggaactttcatttattagatccgcacataacgagattatatcgatccatggaagaagtagaattatcgctccctttctcaaaagctgagctcatcactttactttacaaattaattgaacgaaaccatttccacgaagatggcaccatttatttgcaagtatctcgtggtgtacaagctcgcacacatgtattttcatatgacaaccctccgacaatttatgcctatattacaaaaaaagaacgaccggctttatggattgaatatggtatacgcgctatatcagaacccgatactcgatggctacgctgtgacattaaatcattaaatttattaccaaacgtactagctgctacgaaagctgaacggaaaggctgtaaagaggcacttctcgtaaggaacggtattgtaacggaaggaagccattccaacttctttttaattaaaaacggaacgctttacacacatccagccaatcaccttattttaaatggcattattcgtcaatatgtcctttctttagcgaatactcttcacattcctgtgcaggaagaacttttcagcgttcgtgacgtttatcaagcagatgaatgcttttttacaggcacaacgattgaaattttaccaatgacccaccttgatgggaccgcgattcaagatgggcaagttgggcctatcaccaaaaaactgcaaaaatcttttaatcaaatcttattacaatccaatatggcatcttcttaaacacgaataatttctgtcctttcatattcaatatatgcatttaaatggaaatcaaggtgtaattttatgccttgatttttttcttgtaatctttttgtcatattcagattcctatataagtcttgacagtaatcgacatgctctttagaatttttaacagttggtaaatatttcttcactacattacagacagaaaggaatcgacaaattatgaaaaagtatcttgccggtcttgcggcagtgtctgtagcaggaggagcagcacctacacttgatagtgttcaagctgcacctgaacaaaatacacaaaaagctgctacaactgtccaagcttctgcatcaaacagctcatcttataaggtaaacgcgagcgtattacatgttcgtgcgggatcaaacacttctcacgacatcatctcacgcgtttataacggtcaatcactaaacgtgattggcgaagaaaacggttggttcaaaattaacattaatggacaaacaggctttgttagtggcgaatttgtatcaaaaagtggcgcagcaaacaacaatgtaagtacaggtggaaacaataaagttaccgctgatgtattacgtgtacgtacagctcctaacacatctagttctgtttctgggcgtgtatatgaaggacaaacattaaacgtaattggacaagaaaatggttgggtgaaaattaaccataatggacaagtaggttatgtaagtggcgaattcgtatctggcgtttcttctaatgcaggttcttcaaacaacaatacgaataataacaaccaagaagtaaaaccagcaagcggaaactatacagtaaatgtatcttcccttcgcgttcgtacaggtcctagcacttctcacacaactgtaggttctgttacaaaaggacaagtagtacaagttgttggagaagttcaagattggttcaaaatcaattacgcaggacaaactgcttatataagcaaagactatgtaacaaaaggcggttctaacgaaaacgttacagaaggcaacaaacaagagcaaaacaataataatggaactattcaaactggcggttcttacgtagttaacgctacatctttacgtgttcgtacaggccctgccgcttaccatagtgtaattggtggcgttttaaacggcaccacattaaacgtagttggatctgaaaacggttggtttaaagtaaattaccaaggaaaaacaggctttgttagtagcgaatttgtaaaattcgttaaaggtggcactactactcctgagcaaccaaaacaacctgaacaacctaaccaaggtgcaattggcgattactacattaatgcttctgcactaaatgtacgtagcggcgaaggtacaaattatagaatcataggcgcacttccacaaggtcagaaggttcaagtaatctctgaaaactctggatggagcaaaattaactacaacgggcaaactggttatatcggaacacgttacctatctaaaacaccagttggaggcgcagtagataataagcctaacaataaccaaaataacaatcaaaacaataacaacaataataatacaggcaacaatagcggcgacagttcttccgtacttgcatatgcaaaatcaatgcaaggtgtaccgtacgtttggggcggaacttctgctaacggcgtagactgcagtggctacatctaccacgtatttaagaaatttggtcataacattagccgccaaagtgttgcaggatattggagtagcctaccacaaacttcaagtccacaacctggtgacttaatttatttccaaaacacttataaatctggtccttctcacatgggtatttaccttgggggcggatcatttatccaagctggagataaaggtgtagcaatcgcttcattaagtaactcttattggaagagccacttcttaggatacacgaaagcaccttaattaatagtttcaaagccttctagtttactagaaggcttttttgtacgatttcaacacattactccctttcccctagcttccctctataaaaataatgtatccattcttccatttcatacactttattctacaaaaacaatgcataacgttatcataatgtatatattttcataaaaaacataacctatttcatgtctatttattttatatgtgtttttttgaagaattttctttttatttaaacttttcattagacgtttgacctccgatgtccattatgataagttactaaagatgttatattcgcaaacgtatagacaactggtttatacactgtttttactatgaggaaggagcatacactgcatgaatcttttatggggaattggcggcgtgattggagtattagcaattgcttttctactatcttccaaccgcaaagctattaattggcgcacaattttaatcgcgctagcattacaaatgtcattttcatttatcgtattacgatgggacgctggtaaagcaggtttaaaacacgctgctgacggtgttcaaggattaattaatttttcttacgagggaattaagttcgttaccggggatttagtcaacgcaaagggaccttggggatttgtattctttattcaagcactacttccaatcgtatttattagttcattagtagcaatcttatattatttcggtattatgcagaaatttgttagcatcgttggtggtgcattaagtaaacttcttggaacttctaaagcagaaagcctaaactcagtaacgactgtatttttaggacaaactgaagctccaattttaattaaaccttacttagcacgcttaacaaatagtgaattcttcactattatggtaagcggtatgacagctgttgctggatccgttcttgtcggttatgcagcaatgggtattccgttagagcacttattagcagctgcaattatggcggctccatcgagcttattaattgcgaaactaatcatgccagagacagaaaaagtagataataacgttgaactttctacagaacgtgaagacgcaaatgttattgatgcagctgcacgcggcgcatctgaaggtatgcaacttgttattaacgtagcagcaatgttaatggctttcatcgcattaatcgctttattaaatgggctattaggattagttgggtctttattccatattaaacttagccttgatttaatcttcggctacttactatcaccattcgcaatcttaatcggggtttctccaggtgaagctgtacaagcagcaagctttattggtcaaaaacttgcaatcaacgaattcgttgcatacgcaaacttaggaccacacatggcagatttctctgacaagacaaatctaattttaacattcgcaatctgtggattcgcaaacttctcttctatcgcaattcaattaggtgtaacaggaacgctagctcctactcgccgtaaacaaattgcacaattagggattaaagcagttatcgctggtacattagcgaacttcttaaatgcagcagttgcaggtatgatgttcctataaacttatataaagtcttctctttctacaagaggagacttttttcatgcaatccaaacgtcttttatgcatctattaatcactttatcccaaatataagaacattatgatacaataatctttaagtctttttatttttccgatgaaaatagagatactacttgttgttgcccttcaaaagagtgtaacgacatggtcaatttcttaataattgcgcatactacaagtatctattgatgaaatagctttaaggaggaaagttttgtgaaagataaattctataaaatcctctctatgtggattttacaaattgtattttattttactactgtacatgtgacgaaatatgagcatgcgctcatttttacaataatatacgtaatcgtaaatgtactattcttatttttagctgacaaaacagcatttgttttcttcatactaggaaccattatttccgtattttatttgttctatcaagcatggcttcacttatggagtacatcagatcaatggcaatatatgattatccacttcctgatggcagctaacttcttcattgtatatataacaactcacctattgaaaaaagtgattcatgaaaataaaactttaactgagcgtgtgagaacattagaacaatatattggagaatcaaaattactaacaagacaagaattcgagagacgccaagcgttattaacgactgcaatgaatcgtcgtaatgaaacaggcgttatcatttactttgatttcacttcctttagtaaatatacgaaggaaagtgttatgaaccgtgtagcttctttattagttgaaacagtaaggaatgattttgaccttgctgctaaatatgataataatacgctagttattttattacaaaacacaaatgaagctggtgctgacattgtaatgaaccgcctaaagccaaaaatggagcaatggcttgctgctgaagcaatccgagatataaaaatttcacgcgagcaaattggaaacaaaggacaaaccctgttatgatgactctcgttatacttcttttattccttctgttttgcgtactcgttttttggattagtatcacattttcaattaaatatgtacttatttttacggcttttctattctctggcttactcgtttactactctttattaacaatcgcgggcctaattcaccgaaatagtaaacgaaaagatcgtacgctagaacattatccgagcgtcgatattttcatacctgcccataatgaaggtgtcgttattaaagatactttagaggcgatggcgaagattgaatatccaggaaagctaactatttatttattaaatgataactctcaagatgaaacacctgaaatcggcgatgatttcgacaaagcttatgctcatattcgccacattcgtgttcctcccggtgaaccgaagggtaaatcacgtgtattaaactacgggcttagtatttcagatggtgaatacttctgtgtttacgatgcagataaccagcctgaaccacacgcactgcgaatgcttgtagagcacgctgaaacaactgaagatgctgttggagctgttggacacgttcgtacagtaaacgaaaaaagaaactggttgacgcgaatgatttcgctagaatttcaaatcttccagctccttatgcaatctggacgctggttactattccaaacaggctcactgacaggaacaaatatgcttcttcgtcgctccgcactagaagagcttggtggctatgacccttatgcaattgcagaagatgctgaattaacattacgaattacacaaaaaggttatctcttaccaatcgtcccagaatcagttacttgggaacaagaaccagagcatttaaaaattcttattaaacagcgtacacgttggctccaagggaatttatatattttagaaaaaatgttctcatcactaagtttctttaaaggaaagctgcttgttcattccttacaacaagttctagtgtatgttgtattttggctattcctaatcatttcgaacgtttggtttgtaattgggctgctcgggatattccaaattcaatatagcattccgctactatttatgtggtatgtcgcatatattacatatgtttctcaattatttagtgcccagagtgtcgaacgaacctttacaccgactaatatttttattagcgttattatgtactttacgtacgcacagctctttacgtacttatttattcgtagcttaatcttatacttacgtgcaaagagcaagaaacaagtcattggctgggataaaacagttcgattcaaaaaagataaataataaaaataagcacagagcgccgtatgctctgtgcttatttattgccgtataaattatatatcagacaataccccttagctgaaagtaatttcacgtccatcccccaacgaacgatcgaccttcatttatatacgaaaaagtgattgctatttttgtagaaccaattgcttctcttgctgttctttgcgcgtttcagtcttaggttccgtgctttcttggacactacgatgtgccacacgtttcaaacaaatatgcttccactttctttcgtaacgtttcattattctagatgtcccccttgaatgcgctttaaaactatttgaaatcgcttacaggaaataatatagcacatatatataaacgtgacaacacatttccgacaattttttgtcaaaaatatgaatagaattcgtaagggatcgaatattgtcgaaacctatcgttttttcttcgtataaaaggcatactacttatgtggtaaagtattttatttcccctacccgcattttaaattccttctatataaagtgaaactttcattagccatcaccaatggggcttttacaagcagctcgatttatttgcttttgctgaattttgaggtggggttcttactgctcagcaaatagagggataaaaaaagagctgatatgaaatcagctcttttccttctattattaatgacgcttcatacgtccttctttttgtaactctttaaataatgctgccatcataaagaaaataacaaagacgaacgggaacgctgcaataatagctgccgtttgtaatgcttctaatccgccaatatataatagcgtagaagctatcgcggctagaacgataccccaaatcattttaatacgatttggtgggtttaaactaccatgtgtcgttaacatccctaaaacgaatgttgcagagtctgcagatgtaataaagaatgttgcaataagtaaaatacctaaaactgataaagctgatccaaagctgcccatctgatcgaacatagcgaataatcctacttctgttcccatctctttcactttttcgaagatatgtgcatcaccaaacagctccatatgaatacctgttccgccgaaaacagagaaccaaagtgcaccaattacggtcggcacaagtaacacaccgattacaaattcacgaattgtacgacctcgtgaaacacgagcaataaacgtacctacgaatggtgaccatgcaatccaccatgcccaatagaaaattgtccacgattgaatccattggttcccaccttcgtctaatggacttaaacggaagctcatgcttggtaattcctgaatataagaaccgattgttgaagtgaagtaattcataataaagtttgttggacccgcaaataatacaataatcataagtgcaaacgcaaaaataatgttcgtattacttaaatatttaattcccttatccagacctgtttgcgcagataacataaataatactgttacgattgcaataataactaactgtgtcgttaatgaatttgggatagatgttaaatagctaacaccacctgcaatttgttttgcaccgagacctaatgacgttgcaacaccgaacacagttgcaaaaacagctaacacatcaaatgaatgagcaatacgcccgtgttccccgcccttaaataacggacctactgtcgcactaatcgtacttgcttttccttttctaaaggtaaagtaagcaatacataacgctacaaacgcatatagtccccaaggatgtaatccccaatggaaaaatgaaaaacgcagtgcaagacgcgcactttcctcagttgcaccttctccaaacggaggtgcgtataaatggtttaatggttcagcaacgccccagaaaactaagccgatacccataccagcactaaatagcatagcaaaccatgtcatataactataatcaggttcgtcatcatctttacctaaacgaatagaaccgtatttcgaaacaattaaaaagatagacacacctaaaataatagaaacggaaataatataaaaccagccgaacttactaactaatgcagtttgaattgcggttgttacatttcctaaactaccttttccaataatagattcgggaataatcccccaaattgtaaatgcaatacataatgttaatgaaacgatgaatgtttttgtcagtttcctcatcaaatcccccttcgtaggtttcgcttttgtaaataacataaattccgatatgtaaaatcggatagaaaactataattttgcggtgattttcttactttcaccttcaccaattcgaattcttatggacagccttacctttcgtataaccttttcactctgcaagagctacaagctagaaatactgctgtcaaattgtgtgagaaaaacgcggataggaatgtattttcctaaaaaaggatgtgttacatatgtaaaaaagggcaaatttcttccttgcaaccctttcgttttgtaacaattatgcggttttttttctagtatatagcacgtgtttatagcttcacaaacaaaatgtttatgtttatataactatattacccataaaacggtaaaatactcaaggaatgtaatcgtttagtaaacattatgtaacattactgtaatatttttatttacgtcgaaaaaaacatgttgtattaaatattttgaatataactagaaacctatgattcatatagaatgaaaaacgctttcttatattttttgttatattacaggatattaacgacttattacgaatggtttgtaattgtgtgttttccccaaatccgaaaaaatctgttgctataatgaggacacgaaaacaaacgcaatggaggctatcatgaaaaaattaattggtatagcaacagcagcagtttttggtcttgggattttcacatcatctgctaatgcagaaactgttgtaacaacagatgtactaaacgtacgcgaaaaccctactacggaatcaaaagttgtcggtaaattactaaacggtaataaaatagatgtacaaaatacagagaacggatggtcaaaagttactttagacggtaaagacgcattcgtaagtgcagagttcacaaaaagcatctactacgtaacagctaacgtattaaacgtacgtgctgaagcgaacacaaactcagaggttcttggaaagttgaagaaagacgatgtaatcgaaacaacgaaccaagtacaaaatgagtggttacaatttgaatataacgggaaaacagcttatgttcatgttcctttcttaacaggtacagcacctgtaattgagaaacaagaaacaacggctcctgctaaagctgaagcaccagctaaggctcaaacacctgtagcacaagcaaaaccagctgctaagcctgctgtgaaagctgctgaaactagcgaaccatctggtggtcgtgagttaacagttgtagctacagcatatacagctcacccgagcgaaaacggtggcacatatggcggccgtgtattaactgcaatgggtcatgatttaactgcgaatccaaacatgaaaatgatcgctgttgacccgaaagtaatcccattaggatctaaagtatgggtagaaggttacggagaagctatcgctggagatactggtggtgcaattaaaggtaaccgtatcgatatcttacttggatcagatagcgctgctcaaaaatggggacgcaaaactgttaaagtgaaaattttaaaataaccaataactgctaaattacaagccggttctctttattgagagctggcttgtatttatttataatacatataaggaggctatgcccatgaatgtacaagcaaaagtagactggattggtacgccaaaaccgtacatatataaagatgaagtgacatataacgctacttctattgatttttcactcgctggcgatgataaacgctataagttaattgtgctcaagtctgaaaacaatacacattacaaaattgtgcaatatggaataaaaccaggctctcaaaagccatttcctatcgacattccatttgaacaaaacatgttaccaattatagagcaaatattacatgatccatatgtacaagaaatattaaaggaaacacactcataattgtaaaaaaatatatcaacgatttttcaattatatctatcataacttacgatatatcaacggttggacacgaaatatcgatttagctacaaaaaagaagctgttcaaatattgaacagcttctctcatattaacgagttggaccagatacatcttctgatttcaacgtattatttgcaccaagagaatgatacaacatctttccatttccattcacagttacaatatgttcgctattaaaacttttgaacttcacagatccatcaccgtaacgaatatgatactcttcatatgtcgttactttatatttcgtatcactttgacgctctacattacgaacttccatcgttaataagtcttctgtaattccttttttgtgtaaatactgtatataatcacggtcttccttatacgatttcccactcttatcataattcttttcaattaaactaaaatcatttaatgaaattgcacgtacgttatcataaatatgatttcttacaaattcgcccactgctgaacttgatgtttctttcgggaattttaagtaatacgtgctttggtctccaattttaacactttcagatttcatcacaccaaaatcagtagttttctctaaatgtacttctactgtttcatctgtggatacagggccaagcttataacttccataatttaattttccacgttttttcccattcacaaatacagttgcatcactttcatcagaagaaatgcttacatacttaccttcaagcgataaatccactttcaccttctcgctctgttcatccgctaaatctacttctttctctgtttctaattcagtcagttctgtcttcgccgttgcctttacaacatatgtacctgggaagtatggccccaactctttcgaagttttatcactagaaagctctgtttcttttttgttattcacatgtatttctgcattttttgcagttgtactaatgctcatataataagatttcatgctgaacttatactttggatataagaaccactcttttccctcttctactatttccccgtccttaaatgaagatttatctttagttaacttttgatctactgtctctttctgtaaataagacagtaattgtttgttgtaagaaggattctcttttaaataacgcatgtacgctttaatatcctctgtcttaatctttaagcttgaatcattcgcttttacaaactcatcaattgcattaatatctttcttttggaatgcttcaatcattacatttacttgcttttcttttgaaaacttatatgctccaaatttatatgccccaaataataatgcagcaataacagcaaaaccaatgatcaaaaataaatttttcttacttttcactgattttgtctcgctttgtaattctgtatatgaagcagcagtgttatcaacgattacttctactttactcccacactcaggacaaaagttcaaatggtctgcaacattctttttacatgttccacaaaacttcaacgtgctctcctcctattttttagctaatttcattccagcaaatgccgctacatatgtcacaatcaagctaaacaaagttaaatatataaatgaattttgcatagataataccgttccacttgttccaaataaacctgttaccgttcctgaaacattaatttggaacttagaaatcatattcattacaatcatcataattgtgtaagaaccactacataccgctaatgtaatatatatattggcggtcggtaatttagctaactttcttcccgctctaaacataaagaacaatggaataataagcagtaataaaccataatggaatacattattcactttatcaaattctgcaaggctttcctcatttgctccttttgaaatcaatatctccctaagctctacgccatttacagagacgcctgatataaatgaaaacgatagcgtgctctcatatgtatttgatttcttaccaattctagtaaattctttactaagtgctggacttgatacttctaacggcgcaaaatgagccatactccataattgaggtgttaactctaatgctaataatgtactttcagattttaaaattgttatttcttttaatggttcaataccgtcttccttacttactaacgccataatacaaaccgctatcgctgttactaatagtccttttatcatagctgaaacaccgtaatacacagacgctccatatggcattaactcttgaaatgctactgccatattgtttttgcttgtatgagcaataaatcctaataaggtaaataatgtcccacatacaacaccactcaataaactcttaatcgctgaatagccaaccgtaatcttacctgcttctgagaatggaattgcaaaagattgtgatgctataaaacttataatgaataaaaagacgccataaataataccaactgttgctgccataaagatttgatctttaatcgttttcgcaacatgctgtttccctaaccaaattcctgtaccagcgaaaataataaatggaatgattaataataatgtaaatggagtatgccaagataaagaaaatatcaatccactatcatcgttagctgtaaaaccaagtaaatggtaacttaacatcgtagaagttgcactcgaataaaaacttggcaacatttctaattctttcgcaaatttgctaaacatctcacttaacatagaagcaaataataaactaccaatccaaccagcaattaacatgagaatacttgcaacagccccaccaataaaacctttttgtaacacggctttatctgctttaaattcaactttaggagcaccatccattgtaggcaattttacagattgttcttttttcttcacaacagataaagaatacccgcacttttgacaatataaatttttttgagcattttcactgccacaacctttgcagtattttgcagtatctttttctaatgttactgcatctatagctcctgcaatctccatactaccttcatttgggcaataatttacttcttcaccatgttgttttccacatgtgcgacaatacatttaattcactccccactttgcttaattccacaaactggacagtaagtagagtttttatcgatatgctcattacatgaaatacaatttaccgtttcaccttcattttctaccgctaacatcgggttagattttccacacgaaccacaaaacttatcatttattgataaaggtccaccacattcacatgtagctttttcaccttgttgtttttgcaattcaacaatgcgctttcttgcttgataaatagctacatcaaattcttgaactggagcaatcatttcttttaagctcgcttcatttactccacttcctcttaattgaacatacacttgctgcccaacctctaatagaacctctgcttttttctgcatttgcacttgcattccctttttcaattgagcaatttcttgtgcaacttgcaacttcattttcccttgttctattccttcttgtaacttattcattccactacctaacttcgtctgtaaatctgacaaattacttctcctcctatacgtatatattcatatatgaaattaacattttatatattaccatgattttcaagttatgtaatccaaatttcattttttctgttttgagcattttttgtttataatggtaaaggaaagaaatatgtgtacggaggaatattatgctgcaacactcaattacgaaagatgaaattatgatgattgcgaatgagttcgttcaaggactagatccacagcaaacagctgatcaggaacatgtcgctacagctcggcacctatatcgtagtggtgttgtctacaacgttgactttgatggttatacactgtcaggaactgtagatgcggaaggcaacgtatatagcgttcatattccgattcgtaatgtcgctgaaagttattgtgattgcttcgcaccaacacaatgtgagcatatgctcgctgtattactatctgcagcgtctagtttcgggcaagtaggagatgtattaactttatttaaaaataatacgaaaccttcccttcctcctattagaactgcaagacaagtattgcaatcatcagcttttgaagaaacggattataaaagttgggaatcatattttgaaaaagaatatgaatcatttaaaaaagaacaagctcgccttacttataaacaaatgtattttcttatgagtatctttacagatttctatacgaagcttgagcggaaagctccgcgcgtcatcgccatacatgaattattcaggttacatgcagcaatttactgctttcaaaaattattagaagaaattcaggcattcgaagcaaacaaaacgtattcttatcaccaacctgttaatgtcattcgcctatttgtagataaagtggaatccatcgttcgggacttacaatcagaagcgattccttcagagtctgaaataattttgcaagaaacaactcgtctcgttcatgaagtattcttctctaccgacgcttatacgcaagagcgatttttcatttatcgtcacatatggagtgaacttttaaacaataaagagaacatacaagaggaagaaaaacgaatcgatacgaaaatcaatccactatccaaagcattagcgtcttctcatcttctctttttaaatgatgaagatttactagcgatggacttactaaagaaacaacctgcttctgttgtgagtctatacttctattggttagaagaactattaagtgccatgcaatgggatcgtgcaaaaaactggctttcctttacgtataaacaagtaaagaaaacgatccaagatcacgaaaatacgattttcataaaagatatcgttcggctatttgtaatcatgtatgaaacatacgcaacacatacaaatgaacaagctggttttgaaatgattttacaagaactattaccgtatagtttcacaaactacgaacagtacgtactcgcgaaaaaacagtatcgcacatgggcagagcttcatctcttatatggatttgaggcaatcgaactgttgaaagagccactgaaagatattgaaaaagaagcgccagaagtggcacttcctctttaccatcttgctgctgtagaggcgattgaagaacgaaatcgtaaatcatataaacgtgcagttcgttacttaaagaaattacgtacattatataaacgattaaaacgcaccgatgaatgggatgctttcattattcacatcgccaatctccattcacgtctgcgtgcactacaagaggaattacggaaaggaaaattaatcgatgatcaatcaaactgaagtaacaattaggctccagcatgttagtcaaggttggttcctttggggagaagatgacagcggtactccattatccgtaacaagttggaaacgaaatgcattcacatggcactccacttctttctacggtacgtttctaaaagaagcaaccttcgaaggaaaacaaggtgtgctgctaacaaatgcacaagcctttgaatacattgcaaacaaaccgatgaattcctttgcacatattcaaataaacggcatgattacagcacttacgaaagatgcaaatgaactatgggatgcctttacgagtggtagtttcgtaccagatatgaatcattggcctaaacaaccatcttggaaagttcaaaatacaccaattgaagatgacacattagcatcgcttttctcagcagcagtaaatgaaagcatattacaagacaaccgctcaaatgacggctgggaagatgctaaaagactatatgaacattatgactttacgaaaagacaactggaaacagcactacatgaagaagattggcttcggaaaattggttatattgaagatgatcttccgtttacaatcggactaagactacaagaaccacaagaagaatttgaaatgtggaagcttgaaacaattgtgacaccaaagcgcggggcgcatcgcatatatgtatatgaaaacatcgattccttaccgaaaagatggcacgattacgaagaacggattacagaaacacaagaaggttttagtaaactcataccgtggttaaaagaaggagatacgttccgaaatgaactctttgaaacagaagcgtggaacttcttaacagaagcaagcgacgagttacttgcagccggtattacaattttactaccatcatggtggcaaaatttaaaagcaacaaaaccgaaattacgtgtccagctgaagcaaaatacagcacaaacacaatcgttcttcggtatgaatacgctcgttaattttgattggcgcatttcgacgaacggcattgatttatcagaaagcgaatttttcgaactcgttgaacaaaataaacgtctatttaatataaatggtcaatggatgcgactagatccagcctttatcgaagaagtaaggaaactcatgaaccgtgccgataaatacggactagagatgaaagatgtcctgcagcaacatttatcaaatacggctgaaacagaaattgtagaagatgatagtccgtttactgatattgaaatcgaactagatggatattatgaggaactattccaaaagctgcttcatattggagatattccaaaagtagatgtccctacttcactaaacgcaacacttcgcccgtatcaacaacacggcattgaatggttattatatttacgaaaacttggatttggagcattgctagctgacgatatgggactcgggaaaagtattcaaacaatctcttacttactatatataaaagaaaacaatctcaaaacaggccctgcattaatcgtagcgccgacatctgttcttggaaattggcaaaaagaatttgagcgtttcgcaccgaatttacgtgttcaattacattacggaagtaatagagataagggcaattcttttgaagatttccttcaatcagcagatgttgtattaacatcttatgcattagctcaactcgatgaggaagaactaacttcattatgctgggatgctgttattttggatgaagcacaaaatattaagaacccacatacgaaacagtcgaaagcagtacgaaacttgcaagcaaatcacaaaatcgctttaactggtacaccgatggaaaatcgccttgctgaactttggtccattttcgactttattaatcatggatatctcggaagcttagggcaattccaacgccgcttcgtcacaccaattgaaaaggatcgtgatgaaggaaaaatccagcaagttcaacggtttatctcaccatttttactgcgccgaacgaagaaagatcaaacagtcgcattaaatttaccagataaacaagaacaaaaagcttactgtcctcttactggtgaacaagcttccttatatgaacaacttgttcaagatacactgcaaaatgtcgaaggattaagtggcattgaaagacgcggctttatattacttatgctgaacaagctaaaacaaatttgtaatcatccagctctttatttaaaagaagaagagccacaaaatgtcgttgaacgctctatgaaaacaaaaacgttaatggagctcatagaaaatataaaagatcaaaatgaaagttgcctcatcttcactcaatatatcggcatggggaacatgctaaaacgcgtgctagaagaaaaattcggccagcgtgtcctcttcttaaacggtagtgtaccgaaaaaagatcgcgacaagatgattgaggagttccaaaacggaacgtatgacattttcatcttatccttaaaagctggcggaacaggattaaacttaactgctgccaaccatgtcattcactacgatcgttggtggaatccagctgtggaaaatcaagcaacagaccgcgcatatcgcattggtcaaaaacgatttgttcatgttcacaaactcattacaacaggaacattagaagaaaaaattgatgaaatgctagaaagaaaacaatctctaaacaatgcagtcatcacaagcgatagttggatgactgaactatcaacagacgaactaaaagaattactcggtgtataaagtgaaactttaattaggccaatcacgtagagttttactacccgcaaaaaaagcgctaatctcgaaatgagattagcgcttttttctattccaaaaccaattacttattataatccccgttaacccgccgcacgtatcaagcaatgaatcttgccacattggtgtacggtctcccgtaaaccattggtgaatttcatcaaatgttgcataacccgcaacgaaaagaagggcatatataaaacatcttttcctcgaataacctgatcgatgaaaagcgtaataaatcaatgaacctagcataaagaacaccataaaatgagcacctttacgaaggaaaaactcaataaatccgcctacacctttattcgcaatactaacaggggttcctccaccataatcgatagatacccatgaaaaatgctctttcacaaattcaacatttacatattgttcaatatctgaacgcatatcctgctttttatatggttgtgccgaagaatagaaaatcagccccatccatagtaatacaggaatccaaaataaccatttacgattcattatccagaattctcctctcttcatcttttaagggtaccaaaaaaaagaaaaaatttcacgccaaaacatgacattcacgccctatttataaagtgaaagggggtgatacacatggcaattgaaacaatcgtaatggatttaactttacgtcttgtcttaaacaacggattagataagaacggcaaaacagttttcaagagcaaacaatttaaacgtgttaaaacaaatgcgagcttagatcaagtacacaacgtagctcatgctctagcttccttacaagcatcaccacttcactctgtacaacttgtaagcacatcagatctttctaaactataaagtaaaactcggatcagtggggattttattcatccccgctgattattagcccgcaatttaaccaacagacccaaatcccgtaaatagcgggataaatacaaaggagggaataacacatgcaagtactagagttgattttcgcgaaagaagatggaaaaacagtcgttttttctatcgatacgcccatcacaccaatcgatgcacaagtcgtaaatcaagtaatggatacaatccttgcctcatctgtattttcatccattgatgaaaatacaagaaaaaagggagctcgccttgtagaaaaaaatgtatctgaagttccaattactctataaaatgaaaaagacgaatctgcatcattttgcagattcgtcttttttcttcggcatttcaatcgggataaaaacctttgaaaaaccgacgcatacatacttataatgttcttcccctatatcaaactcagtcgtatatgttgagaagaatatataatcatttcgcttcgtataatgatcaattaataacccaacttgtggttcaacatactttttcgctaactttttaccggccgatgccaaatcgccaaggagaccctcttcattctctttttgaacttcatctagcttcttactcacatcattacgcttcataaactgtttcgctgcccattctgtatattcgcccttactcggattactgtttgctaaatatactaggagaacgacaactaaagccataataatatactttttcttcatactatatcaccgcctactcttttctattttcatatatatgtacaagcgatgcaacttagaaagactatcacctattgattgtaaacgaatagccaaaatttacaatatgaaatagaatattaacaactaatttacttaatttatatataattatattcagaatgtaaattataagggaggatatagaattatggataatgaaaacaacatttttatttctagttctacaatgatgcttgaaccatgtaaacacccttattaccgtacaaaaattattgacagtagcggaaaccatctttactcctgtcaaactgctctccaacttatacagaaatcttgtctaacaaatattcattctacttatcaagggagacgtaatgctgtaaaaacaaaatttaaatttaaacaaaacgttccaattccgatcaatcatagagaatatatttgtgctttcccaacagaatctcctgcttctccaaattgtatttggcttttcttcaaacatgttcatacaatagagtttttcaaaaaagctaaacgagctaaaattcatttttcaaacggagctaccgtaacgatacaaattagttcccataagctaagtcagcaattatggaaagcgggatatgtattatcccaaatgaacatgcaagattcatcaccttaataacaaatagaatggaaggtagtatttcctcaccttccattctatttgctatttttatccttttacactatcgcgcattttctcgattgcttgccgatacatccaccttacttgataatatgtcatttccgtctctaaagcgatttctcccatcgtcttccctacaaaaaaacgttcaaaaataatatacttctccttctcgtctaacacactcataaaatccttcactcttatttcaacatcttcaaaatgaaagatatcctcatactcacctacacatacacatctttcttgcaaagtagattctttcttcaatctttctaatatataaccacgcaccgttacaagtgcatatgcagggaaatatcccttctttgcatcaaatctttcatacgcatgccaaagaccaattaaaccacattgataatactcttcataatcttgacggatacctaatttctttatttgatttacaatcatcccttcatacaaaacaactgtctctataaaagtcgctggcttcacacagtacccgtttctaaaaggtatacctttctagtattccgcggtaccttcacaatataaaaataaacaaaagatttcaccgtgagtaatttcaaatactaccgacggaatttgaaattacaccagctagtatttgaaattttgttggtggtatttgaaataggggtaaaaataaaaaaggctccttctatacattagaaggaaccttttgtttatgagttctcaagttatactattctgtagttatatttttgaaaaatctatcgatcgcatatagaccagtagctaaaatataacttgtaacatgaacaaaaaatttgctataagtttcttaaatatatgtatcttctccttataacaaaaatgcagcaattacttttataattgctgcatttctttctagttacatgaaatatcaatattattgcaccaatcctcttagtgcaccaaagccgatcgttaaaatgaagaagataaccataagaatcgttgccttctttttacttaaaccggccgtaatttgaagacctaaccatgtgataacaaatccccaaattgtaaatacttcaatgctatttgcaataccttttacagcgcctccacttgaagcaaaaattgggcctaaaccagtgtaaagttcttttcctgaaccacctagaataagtgctaaaactatatttattaataaaccaagtactgaaataatgcttgaatatacattaattgttaataatttcttgtaagaagtatcattgctcattaacatcattaacactttatatacagcagcactaatgaagaaacctattatcataccgataacaccaaatacaaaaccagcaccgaaagtcattacaggtgtaacattaacccctaattcttgattgagcttaattgattcaggtgttaaagaatatacataagcaccaattccaccagtaatccccgatagtaaagaaagtatccaaaacgcaccccaaactgcattactattcttcattctctcaaactgctcacctggagaagtaatcattcctaataatgatggcttcttcgcacctacatcttgcgtattaatatttgcttccattataacgcctccttctatttatataacccgttctaacgggcggttcacttcctcatatagaggctacgaaccgcccactagaacggtaatgtgtagttctactacactattaattactcataacgcaatgcttcaattggatctaatttcgcagctttatttgctggaattaatccgaaaataataccgagtgtcatcgagaacagtacgcctccaacgacaacttcccacgaaacgagtggtggccattttgcgaatgtagaaacgatatatgctccgccatacccaagaccaattccgattaaaccacctagaagtgttaacataacagcttcaattaaaaactgtaataaaattttactacgcgttgctccaagtgctttacgtacaccaatttcacgtgtacgctccgttacagatacaagcatgatgttcataacaccaattccaccaacgactaatgaaataccagcgataccaccgatgatcattgtcataataccagtcatcttcgaaataccttcttgaatttcttttaaattcataacttcatatttaccagttgcatcggtcggtttacgactatttaaaacatctgcagcttttttacctgctttttctagattatctacattttttgcttgaacagaaatattttgaatttcatcttttccatacagtgtcggccataatgaaattggaactagtgcttctgatggtcccattcccataaactcattatctgatttgtagacaccgataatttgcatcggttgacctttcatttcaataattttaccgactggattggtatccttaaacaccttttcttccatttgtttactaatcatgacaacgttattaccctgatccacatctgattcttgtaaagaacgtccctttaacaactttactttatttactgcaaagtactcactatctaatccagtaatacttaccatttcttttttatcttcaatatcaagtggttccatgctggaatttgttgttaccacatgtgcgatctctggaatttttttaatttcaaaaatgtcttcttcagttatcttcggtgcttctaccattcccataccgaaaggatcgtttatatctgcactataatgaatcggaaccgtttgattacctgccccaacaaactgcgatttcaatgcagcttccccgccttgcccaattgcaacgacagtaataatcgaacctaccccaataataataccgagcatcgtaagagctgaacgcagtttatgagctaaaatagaagacagggcaatttttatactatctagtaaactcataccgcacaccttctatcttctgtaactttcccgtctcgcagtacaatgcggcgggaagaatacgctgctacttcctcttcatgcgtaaccataacaatcgtcgtaccttctgcattaagcttcgtgaaaatattcataacttgctcaccagacttcgtatcaagtgcaccagtcggttcatcggccataatgaacgttgggttattcgcaatcgctcttgcaatcgctacacgctgcttctgtccacctgataactcatttggtaaatgatgcacgcgatctgccaatccaactttacctagcgcttccaaagcacgcttgcgacgctccgctttcttcacgccaccatatacgagcggaagctcaacattttccactgcggaaagacgaggtagtaaattaaaatgctggaatacaaagccaatatattcattacgaattaaagcaagctttgactcgtctgctgttaagatattcacgtcattcagcatatattcgccttctgttggacgatctaaacaaccgataatattcataagcgtcgacttaccagaaccagacggccccataattgaaacgaactcaccgctctgaatcgttaaactaataccatgtaaaatcggcaccgccaattttccttgataatacgttttagcaatatgatttaacgtaatcatttctctttcacttccattccgtcatacacatcgtcggaaggatttttaaccaccttttgccccactgttacgccttctacaacctctgtccagtctccatcagtagaaccttttttcacattttgtttacgaagcttacctttttcctcaacataaacaaatgcatcatcgcctttttctacaatgctcttacttgggacagcaatcattttcttattctctaagtttacctgcaatgaaacgtggtagcctggagataaaccgtcttggctatcaagacttgctttatatgtatattgagacatattttgagttgcttcacccatgccgccagcttgcgccatctctgcacttgttgggaactcacttacctctgtaatcttacctgtccacttcttcttattatttgctttcgcagttacagtgaatgtttgatctttttgaatttgtgacttctgaagctcagttaacgtaccttgaacttggaatggatctttagaagctacttgtaaaaacgcttttccttgaccgcctagcgcttgagatgaactttgtgccgcatctttatctaacttttgaacaacaccagcaaaattgctataaatcgtaagttctttctgcttcttacttaactcttctttctgcaactttcctttttctttctcaaggtcaattgttttttgtcctatctctaactcgtttacttgctcgtccattggatctgttacttctttcccagctccgctatctttcgccttcttaatttctttcttcaatgaatcaatcttctttttcccttgatcgtaacgcatatccgccatcttctgatcaagctcagcttgcttcatttgaagattaatctcttcattgtcataagagaataacttcgtacctttttctacctcttgcccttcttttacctcaatatctttcacttttcctttggccggatctgcatagaaactttcaatattaccaggcttcacctgaccagaaattaacttcgtattattcagcttacgttctgtcactttctcaaaacttacagcatcagacgttgttgatgcacccttcttcttaccttgcataacaaaaatattaattgccgctacaataacaattagtgcaataaccccaataataatccatttcttcttcttgtttggagtacgaaccgtatttggtaacatattctctctcctttttataacttaatagtttaatataaaaattgtataaaactttctgaaaatagattacatattattacattgtttttacaaagttttacacatccatttatattgtaacaaaaattccaatgattagaaatatgacattatatcttttaagatagatttaaggaaagtttatattatatagaaaaagccatccaaaataataattggatagcttttcaaacaaaatattacgctactttaggatcttttctctcatgtccacgttgaacaataaataagaagattgttgataaaaccgctcctgttaatagtaagatgaaacaaccatcccagccagaactatcaacaataacaccaattgctgcgttagctacaagacttccgcctacgtaaccgaatagaccacacataccaactgtcgtacctactgcaaatttcggtactaattccatcgcacttaaaccgattaagaactgtggtacataaattaaacaaccgataatagaaactgcaatacttacaacaagtacgctagttgcttgccaatatataaacgtaccaataacaactccaaccatactaataatacataatggcatacgttttcctttaaataatttatcacttaaaaaaccaacgattaatgaacttggaattgccataccttcaaagattgcatatgccgcatgcgcttctgcttttgaaaatcctttaactgtcgttaaataaagtggaacccagttaataacaccgaaacgaattaaataaacaaaagcattcgcaatacataagaaccatacaaatttatttttcactacatacttcattaaaatttcttttggtgacatcttgttagcattatctgctttttcaagattttcatagtcattacgatactcatcaattggaggaagaccttcagattctggtgtatccttcgcattgatccaaacaagtactgcaattaccattgcgataatcgcagggaaaataaacacgccgccttgccaatgattttcaccgaaaatacctacaccaattccgacaagtggtggtacaagcattccaccaacgttatgtgaaatattccaaaggcctgttttcgtaccacgttctttcttcgagaaccatttcgtcataacaatactacaaggtggtgctcccataccttgtacaataccgttaacaacaagtaatgtaacaatcatcccaaaggatgatgcaaagccgaaacaaatatttacaagccctgataagaataaaccgactgcaataaagcgctgggcgaaagctttatctgataaattacccataaagaacttactaaatccataaacaattgccattactgagcctagtagaccaatttcagctgtactaaaaccatattcttgtactaaatacgtacttgataacgtaaagttactacgaactaaataataagcagcatatccaactgaaattccgattaacacacgaatacgtagtaatcgatatacacggtcgatcatatccgctggcaatctttcaattgcaggtgctggcttgagccatttaaacatatattttcgtctccttttctcacttcagagagagacgctgtctattccatatctcgattattccgctatttgatatattttggttcgtccttctaaccggctgtccttctatttctttctcattcttcgcaaacatcgttggtacgccaaacgacactttttctaaaatatgccccgcttcttctgataaacaataatcaataaataaatccgcaataataccactcggtgcacgttttagtttcgaaatcgcattaacggataaccctgtttgctcaggttcgttacttaaaatcggaaagccttgtttttgaagcattctctgatctcccataaagttgatgcctatcatatattcaccgctcgcaacaagttctgctgggatgtaaccattcactgttacttctccaacttgttctgccagattcttcacatatcccttcgcttcctcttcacctaacgtatcaatcagtgattggaaaaacgtatatgctgtacctgaaacatttggatcgggcatgacaatctttcctttatatactggattcaataaatctttccatcttaacggatacgagagaccgagcggcgctatttcctcgttccaccgctctttattaatcgcaattgccagcttctccacttcataaccgtaccaataaccatctttatctttaacagtttttgaaatacgatttgcatgttggcttatcacaggaatagaaagatttttttgcttcatcatttgatgcgcatctactgtaccgccaataataatatccgccttcggatttccagcttcttcttccactctacgaagaagttcttctgttgaaagacgaataaattcatacgtacatccgcgcggcttacaaaatgatgaaagtaacgcttcaccaacttcctcacgagccgctacatacgcaacaatatgacgatcatccaaaatagggagaccatttttactatatttaatagaggttgtatctcgagagcaactagacatcgctcctccaattactagcaaaaagaagaaaaaggctatctttctcatgacgcattctcctttacgaataactctgctagagagcctttcatatacatgacatttccgttattatcaccgagatattgcacaacaaagtacgatggatacacagaaatcgtaagaatatcttcacgatcattttttacgcgcttacctgttttataagctgtaatataagcaatcggttcattctgcgattgtaataacttctgaatttctccgtaatctgtaatttgctttgcgtaccaaatagaatcaagtatgtgcgtaagattgatagtacgtaccacatcgccttgacgtactacgacatcctttgctgaagcaaagaaatcactaatacgctctggcgtgtaatacaggcttaataaatacgtttgaagtgctgaaatcatcggatccatgccattctttccgtatacattttccccatactggaacaagtcacctactgcaaaagtacgcttatgtccattcaagtacgttacttctccagtaaatacttgttcttggctcttaacgtcccctggctctattcgaattcggtcaaagaatgaaacaatcgtatgcaaacgaacttcatccgttacaacgatttctccccacttttcatgtcttactttcacttcaattggaagagattcattcaccctttgtaaaacggcttgtttatcatttacaatgttgattcgattatagatttgcttctccataacataaaacaaaacaagagaaacaatcatacaaatgacaaacataagaatttgaaatgatagccttttcatttctgcctacctccaagataaaaaaacgttgtttcgaaaataccgcataattgtttcataaatgtatcatttaaccgctttcaagttttttatgtcttccatccttctcggaagcaaaaatgtaatgaatattgtagtacctatttcttcactactctcaatccgcatgcttccgccctgcttattcataatctcctgacaaatatacaaaccataaccattcccgtaactagaaggaagtgcctttcctttcggagactcattccactctgcaagcaccacttcatctataccgatcccatcatcatgaacaaaaaccttcgcctcatgctcatttacaattacattcatacgaatgtgcgaagcatcactatacttaattgcattatcaagcacatttaagaaaatttgcttcgtcttatcaaaatccgcaacaacatgtacatccgttaactcatttaccacttcaatttcaaactgatttagacgaggtttcacaattgaaactgcttcttctgccaattcctttatattcacaactgtaggagacacttcaaacgtactcgtcccatatttcgaagacttaagcagttcctctacaagtgataataaacgctcactttccaccgccacataacgaagactttcctgtacatcttctttcgattgtaacttcggaattaaatccacataaccgataattgccgttagcggtgtttttagctcatgcgtaatgcggtctagaaaatctttctgcttttctttctcctcctgcaactgcttaatatgcagctcaattccatcggccatcgcattaaaagatgctgaaagctgagcgatttccacatactcatttaactcaatcttactcttataatcaccattcgcgagccgctgtgccatttgtctcaactgatcaattggtttatgaagagacttcgccaaacgaatcgcaaagaaaatacccgtagctactaaacaaagagatgtcattaagaaagtccagctcacatttgttaaaacttccttctcacccgttaactcatttataaaacgaatacttccaatgacatcgtttccataataaaccgggcttgaaaacaaaagaataggagctggatccgcctcctcaaaaacgtaagacttcttccccttcaaagaactctcaatgtcgatgttacggtgaagcaatgctcctttttgtgtatctgcaacaacatcgccattcttcccgatcatctgcacacggacatccatacgcttcgctaaatacgacgcaattaaaagtgaattcggaccaagcgtatccacttctgcttccttctctaaataattcatcgtataaatttgtgcttctacacttaacttttctaaagaatctgctgcgttatgatacatattcttttctaacgtaatataaacaactgcatataaaagaacaaaaatcggaattaacagcccaactattccaaacaccatatttcgctttaaagacataccatcaccacttaacaatccagtttatagccaacgccataaattgtcttaatatattccccgctcgtcccaagcttctttcgaagtctctgcaccataatatcaactgctctcgtatttccgatatactcaaatccccatactttctcaagcaactcatccctcataaacacacgctgcggatttgaaacaaataactgacataaattaaactctcggtacgttaactgaatctcttgtccactcacatgtacctttctttccttaggacaaatcactatctctccagcctcaattacttcatgacttacagccgcctccgtcttctttacacgccgcgccatattcttaacccgaagaataagctccgcataattaaacggcttcgtcacataatcatcagcaccaagctgcaagccaagcaacttatcattcatctgactctttgccgttaacatcagcaccggaatatccctatccctctcacggaacaaacgaagcaactcatacccatccgtatccggaagcataacatccaaaatcaatacatccggcccttcattccatctctctaaagcttctctcccatcagccgctgccaatacttcataaccttccatctccaactgcatccgaatcaaattacgaatactcgattcatcatccaccacaagtattttcatcattctcctccttccaccacgtattatagtacagtttagtatagcaaaaatcctataaaaaaagagagggtattgtcgaacatattttgtcgacgataccctctccccttttattatttagctacaaaataatccgttacatattgtgcccaaacttcatgacctttagcagttgggaaaccaaattcttcttttaagtatggtaggatagcctttgtcgatgcatccggccatgctccccaatgatcaatatatgtataattattttgcgttgcaaattgttttaatgcttcaatcgatttcggataatttttcgcaccatacactggattcgatggttgaatcataatcgtagcgccttttgcactagtagaaagtgcttgaacaaacttctgtgtattcacaacagagttcccattaccagttttaccgttatcggtaataaatggtggttcaaataaaatcacatctggattgtctttcgcgatctctttatcacgcttattcgcgattaactcttctgtgctttcacccttatattcctttacagtcacattccataaacccttaccgtaagccgtttctaaattagctgttaacttagctgcccaagcacctttttcagatgaagaaccttcatcaccaacgataacaagatttactgcctttttatcctcagcagctttctttaacttctctttcactgcatctggcaagttcttcgcgtatgcttcgttaaaagatgacttcgcatcttgttttttctcttcctttttctcttctttcttcgctccgctatctttcacttcagcctttgttttcgttacttcactcgtttgtcccgttgcattcgcaatcttcttattccagtacaatttaccgctcacaatcgaagcaacaaacaatacaaaaataacaaggacaagtaccgctttcttattcatcgattcacctcatctattaatctcacaatatataatactaatataaatccatgcaaaaataaacccaactccttccaaaggagttgggttattacatattatttagtcacttcaagatgtgctcttaacttattcgttaaatcttgttttgctgcatccggaacatagtagtaccaaataccatcagcggctttgtggccgtcacctgggatttgaatttcttcactgttcttcaagcaatctttatagttcttttgcatatcaaacatttgatcttgcgttaagtttgttttcacgttcttttgaattgctgttaacacatcgccatagcttgttaaagaagagaaggttgcacctttcttaataacagcttgcatcacttgacgttgacgcatttgacgaccgaagtcgcctcgtgggtcttctttgcgcatacgtgtatatgctagagcttggtcacctgttaagtgaatattccctttctggaagtgtttcccttctagggagaattctaaatcattattaacatcgacaccgcctactgcatctacaatatctttaaatccttccatgtttacttcaatatagtaattgataggaacatttaagaatttttctactgtcgctacagacatgtctacgccaccaaatgcgtacgcatggttgattttatcacttttaccctttccaacgatttcagtatacgtatcacgaggaatacttactgttttcattgaattatttttagggtttaatgtaatgaccattaaagaatctgaacgtcctttatctccaccacgctcatctgcacctaatagtaaaattgaaacaggttcagatttattgattttttcttctggtttattaccttgatcgcgttttaatggtttatgaacttcatctaatgtttttgaaacagaagaatatatattataagcgtaagctcctccacctataattagtactcctataattcctaatatccaaaataggattttctttttcatgcttttaaccttctttcttcaggtaccgctatcaaattattataactacaaaatataaaatacattatacatgtaattcaatttttaagccaaactatattgataactcaatgaaagttttagcaacctataaccaattctctagttactaactttttgatatccagtcttattttcagactgccacctccaagaatctgcacacatttcttctaatccgcgtgttgcctcccagcctaattcacgctttgcttgttcaatccttagtagctgcttaatatatttgtctaattttttgggttcagttcattttgatagtctttttttgttgtatggattgaattatataatgtattgcaaatagaaataatagaagtaatgcggaaaggcggtggggggaaatgaaatatccagaccatttagtaaaacaagtgcaagagcgcagtgctccttatcaactagaaggttttttaagtggacaaggtcctgaaaatcccaaatttatgttgttaggagaggcgcctggtgaaacagaaattcataatgggattccgtttagcgggagggcgggaaaacaattaatggattttttagagcgtattgatgttacaagggaagaagtatatattacgagcgctgttcgaagtagaccttataaatggcgagagaaaaaagaacgaaatggtgaaatcatacaaaaaaagtataatagaacgccaaatcagggagaaatagttgcccatgcgcctttgttagattatgaattagagaaaatacatccgaagcttatcgtcacgcttggaaatatcggtcttcaacgtttaacaggaaaaaaaaaaacaatcacagatgtacacgggcaattattaaaacagcccattcaaaaattaaaggatatgcaaagtgcagagtttacatggtcagagaaagaatatcatgtttttccgacttttcatccagcttccattttttataatcggagtttattggagcttattcatgaggattttgagaagcttaaaagacttgtaataaaaaactagaaaagctaaggcgcttttctagttacatttaattatgtaaagggtttttattttcatctaacgtaaatccttcaccaactacatcatgtacatcacttacagcgacaaaagcatgaggatctacagaagtaatgatattctttaatttcacgatttcatttttagcaacaacgcaatacaatacgttacgttccacttttgtatacgatccaacagcttttaaaaaggttgctccgcgctccatttcagataaaattttggcagcaatttcatcgtttttctctgagataatagtcgctcctttggcagcataagctccttcttgcataaaatcaatgactttagcaccgataaaaacagcaactagcgtatacatgccctcgcggtatgataaataggtaagaatagagactacgataacgacagcatcaaacataaacattgttttccccatactccagccaacatatttgtgagctagtcgtgcgataatatctacaccgccagtagtcccgccatatttaaatattattccaaggccgataccgataaatgccccggcgaataaagctgcgagtgtcatatcattttgcaagtttaaatgtaagttgagtacttcgtaacgctggaaaatccatagaaataaagatacgctaaaggtgccaattaatgtatataaaaatgtcgttctgccaagtaacctccaaccaataaaaaatatagggatatttaaaattaagtttgagtaggaaggatcaaacttaaataaaaaatacaataatagtgtaataccagtaaacccaccctctgcaaggtggttttcaatattgatattgacaataccgaaagaaaatatagcggaaccgattaaaataaaaataatatttcgcatcttcaattttgatgtcatatagaaatccccctaattatgtaatgattgcattgctccgctgaaacagtaaaacataataataagtaatttctagttgctagtgaaaatagtaagaacttgattgatgtgggctgatcttttgtgaaaagcacaaaagaaggtttcacgttatcccgctctaacggctgataggagatgaagcaaagaagaggggcaaaccagccgtaggaacccgattagttcaactaatcttttgcaaaaaaacgcaaaagaagtttcactttattatagtctatccaaaaatgggtcgcaaataggtgtttggcggggaataatatttgtcaaatcgcgatgaattggctaacatgaaagaggaaggattagaggtgaatagtatggaagcaaaaacgatgaaagatatgcagaaagaagtagatgcatatattggtcagtttaaagaaggttatttcagtccgcttgcaatgatggctcgtttaacggaagaaatgggagagcttgcaagagaggtaaatcattattatggtgagaaaccgaagaaaacaactgaaaaagaaagaagtattgaagaagagcttggagatgtattatttgttatgatttgtatggcaaatagtttaaatattgatttagagacagcacataacattgtaatgaataaatttaatacacgtgataaagatcgctggacacgtattgatgagggagagaaagaataatgaaagaaattaaagtaattatcgccggaccaagaggacgtatgggacatgaagcagttcttcttatggaaagaacggaacattttaatttagtagcagcagtggattataagcatggtggtgagaagatttctgatttacctggcatgccagcattacatgcaccgatttacgctgatttacatacttgtttagatgaagtagaagcagatgtgttgttagatttaacaacaccagaagtggggaaacaacacgttacacttgcagttgagcgtggacttcgttcggttattggtacaactggatttacagaagaagaattggcacgtttaacagagaatgcaaaagaaaaagcagtaggaacaattattgctccaaactttgcaattggtgcagttcttatgatgaaattctcacaaatggcagcgaaatatttccaagatgttgaggtaattgaattacatcatgatcaaaaattagacgcaccatctggtacagctgtaaaaacggtagagttaattcgtcaaaatcgtgaatcaaagcagcaaggtcatccaaaagaagtagagcaactagcaggtgcacgtggtgcaaatgtagacggtattcacattcatagtgtacgtttgccagggcttattgcacaccaagaagtaatgttcggtggagatggacaaatgttaacagttcgtcatgattcattcaatcgtgcatcatttatgtcaggtgtaaaactatcaattgagacagtaatgaaccttgatcatcttgtgtacggtttagaaaatattatcgactaaaggggagacaacggatgaaaattgccttaatcgcacatgacaaaaagaaaaatgatatggtttcgtttgcatacgcatataaaccaatttttgaacaacatgaattatttgcaacaggaacgacagggcttcgtattatggaagcgactggattagttgtaacaagatatcaatctggccctcttggtggagatcaagaaattggtgcaatgattgcaaagaacgatttagatatggtgattttcttccgcgatccattaacagcacagccgcatgaaccggatgtgaatgcattgcttcgtttatgtgatgtatatgcgattccacttgcaacgaatatggcaagtgctgaaatgttaatgcacgcattagagcgaggagatttagattatcgtaagttaagaaaatgaggggaacaattatgagtggattacatatattagcgtttggtgctcatgccgatgatgttgaaatcggcatggctggtaccatcgctaaatatacaaagcaagggtatgaagtaggtatttgtgatttaacagaagctgatctttcttcaaatggaacgatagagttgagaaaagaagaagcgaaggttgcagctcgtataatgggagtaaaaacgaggctgaatttagcgatgccagaccgtggtttgtatatgaaagaagagtatatacgtgaaattgtcaaggtgatccgtacatataaaccaaaactagtttttgcaccgtactatgaagatcgccatccagatcatgcaaattgtgcaaagcttgtggaagaggctattttttcagcaggaatccgtaaatatatgccggaactttcaccacatcgtgtggagtctttttataattatatgattaatggttttcataaaccgaatttttgtatagatataagtgagtacctctctataaaggtggaagcattagaagcgtatgaaagtcagttttcaacagggagcgatggtgttaagacaccgttaacagaaggttacgttgaaactgtaatcgctcgtgagaagatgtttggaaaagaagttggagtcttgtatgccgagggatttatgagtaagaaaccggttttattacatgctgatttattagggggatgtaaatgaaattaaaaataggtattacatgttatccttctgtaggtggttctggagttgttggaacagaattaggaaagcaattggcggaacgtgggcatgaaattcactttattacatcgggtttaccattccggttaaataaagtatatccaaacatttattttcatgaagtgacggtaaatcaatactctgtatttcaatatccaccatacgatttagcgttagcaagtaaaatggccgaggttgcacaaagagaaaacttagacattttacatgtgcattacgcaataccacatgcaatttgtgcatatttagcaaaacaaatgatcggagagcgtattaaaattgttacaaccttacatggaacagatattactgtgttaggttccgacccttcgttaaataatttaattcgttttggtattgagcaatcagatgttgtcactgctgtctcgcattcattaattaacgaaacacatgagcttgtaaaaccaagtaaagaaattcaaacggtatataactttatagacgaacgtgtatatttcaagcgtaatatgtctcaattaaagaaagaatatggtataagtgagagtgaaaaagtacttattcatatttcgaatttccgtaaagtgaaacgtgtgcaggatgttgttcaggcatttgctaaaattgttaaagaagtagatgcgaagttgcttcttgttggagacggaccagaattctgtacgattttacagatagtgaagaatttacatattgaagatcgcgttttattcctagggaagcaagataatgttgcagaactacttgcgatgagtgatttaatgttgcttctatcagagaaggaaagttttggtcttgttttattagaagcaatggcgtgtggtgtaccttgtatcggaacgcgggttggaggtattccagaggttattcaacacggggaaacaggatatttatgtgaagttggcgatacaacaggagtggcaaatcaagctattcagctattaaaggacgaggaacttcaccgtaatatgggagaacgagcaagagaaagtgtttatgagcaatttcgctcagaaaaaattgtttcacaatatgaaacgatttactatgacgtactaagggatgacaaaaatggaaagatttaaaaaagctagttctattattgagacattaaagcaacaaggacatgaggcttactttgttggtgggagcgtacgagatcttattatcgataggccgattggagatattgatattgcgacatctgctctaccagaagaagtgatggctatattcccaagaaatgttcctgttggtcttgagcatggaactgtaattgttgtagaaaatggtgagccttatgaggtaactacttttcgaacagaaagcgaatatgaagattttcgaagacctagtagtgttcaatttgttcgttcattagaagaggatttaaaacgtcgtgatttcacgatgaatgcaattgctatgacagaagaaggcaaaatggttgatttatttgctggacaggaagccattcaacagagagaaattgtgacagttggaaatgctgcggatcgttttcaagaagatgccctgcgaatgatgcgtggtattcggtttgtaagcacgttaggtttttcattagaaatgaaaacgaagcaagcgattgaaacgcatgggcatttgctagaacatatagcaattgagcgtattacagtagagtttgagaaactgttaactggtacatattgtgtgaaaggtctcaaagaattagtagagacgaagctattttctcatttgccatatttacaaatgtcagaagagagactgttaaaagctacgcagtataaatgggattctttcgaaacggatattgaggcgtgggcatttttcttatattgtatcggagaagaacatccatctgtctttttacgtcaatggaagttttcgaataaaaaaataaaagatattgttgcagttttattggcaattcgtactagaaaggagaaggattgggatacagtccttctttataaaacgggaattcatatcgctgaaatggcagagagagtatatgaagcgatgattgaaagctatgaccctacatctgttgaacgagtacaattaatgtttcatgcattgccaatccaggaacgtcaagaaatgaatgtgactggtaatgatttattaaactgggcaaacaaaaagcctggtccgtgggttgctgaaatgcttcagaaaatcgaagaagcaatcgtacaaggaaacgtagttaatgagaaagagcgtataagggagtggctgcaaggatgcaatctactataagaaagcagttattgcaagttttttctgaagcggatggcgagtttgtatccggccaaacaattagtgataaacttggttgttcaagaactgctgtgtggaaacatatggaggatctgcggagtgagggatatgaacttgaagctgtgcgccgattaggttaccgaattgcaagtaagccagacaaagtgactgctaatgaaattcagttagggctacaaacgaagcggattggtagaacagtgtattttgaagaaactgttgaatcaacgcagcacattgcagcaaaacttgcttatgaaggtgcagaagaaggaactgtcgttgtagcagaagaacaaacagcgggaagaggtcgtttaagcagaaaatggcattcaccaaaaggaacagggatttggatgagtattattttacgcccgtcaatcccagttcatcatgcaccgcaacttactttgttagcggctgttagtgttgcacaggcaattgaaaaatgtacaggtgtaaacgtaggaataaaatggccaaatgatattttaattcaaggtaaaaaggctgtaggtatattaacagaaatgcaagcggatcctgataaaattaatgctgtcattatgggcatcggtattaatgcgaatcaaaagcaagaacattttgatgaagaaattcagcacatcgctacttcattagcgattgaatcaggtaagccgattgttcgtgcagaacttatgcaacaaatctatttacaactagaaaaattatatgaagaatatttacaaaatggtttctctgtcattaaaattctttgggaaagttacgctgtgagcatcgggaaagaaattaccgctcgaacgatgagagagacaattacggggttagcaaaaggaatcacagaggatggtgtattacttctggaggatcatgaggggaaagtacatcatattcattctgcagatatcgaaattaagtaaaagaagttcctcttttggaacttctttttatttcaatagttttgagttgaatttgtaacatgataataaattcttttcatatttaaagttcatttcaaaatagcttccgtcgagttgacctggcatgttatttgacgattactttgcctgtcattcctttaagaagatggtatcgacatattaattcatatgtaccagtatttttaggtttcacggtaatattcttttcttttcctgactggactacgacgtcaataccgagttttttcactgtaaaggtgtgctcgtttttacctttatttttcaatagtaatgttgttgatccttcaagcggaatcgtgatgacatttggattaaagtaatcatcatttagttcaacctcaatcactttcgttaaatcggtgggttgtgttacgacatgaactgaggcaaatacttgggaggatcctaaagacatccaccatacaatcattacaagcaaactgctgaatcgaaataaccacctgttcatagacatctgcaattctcctttgttaagtactttcctcaattaacctgcatcattagtttaagagttatactatatagttaaattgattacagaaaaaattaacttggacttttttaacatgcgttgaaaaaacatgtatcttttcaggattgaattatccataaaaactgtatagcatatatactctcgtgttaaatttcatataccgtaataagaataaaaaattattttttcgaaaaaatgtagtaattcctttttgtagtttgctataattagttcgaatgtgggcagtatcagagcgaactgcaccatgattcgaagtcatacgaaaaataataacttggattctgccttgatccaataacggactgggacagagggatgaataatgccgactaacacacaacccttctgcccttttatggccagaggggtttttttatatgatttcggccatctcctctctcctgcataaaggaggagtagtttttgaaaacaaaaacagattttttgaagatgaaagagcaaggtgagccgattacaatgctaacggcgtatgattatccatctgctaaattagcagaagaagctgaagttgatatgattctagttggagattctcttggaatggttgtactcggatacgattcaacagtacctgtaacagtagaggatatgattcatcatacgaaagctgtacgccgcggagcgaaagagacgtttattgtaactgatatgccatttatgtcgtatcacgtatcattacaagaaacgatggtgaatgcacgccgcatcgttcaagagagcggggcacacgcactgaaggtagaaggtgctggagaagttatatcgacgattcaatatttgacgaacgcaggaattcctgttgtagcgcatttaggtttaacccctcaatctgtaggagtgttgggtggatataaagtgcaaggaaaagatgcggagagtgcaaaaaaattaatagaagatgcaaagaaatgtgaagaagctggtgcaatagcgcttgtgttagaatgtgtaccaatgcagttagcagaacttatttcagagcaactaacaataccgacaattgggattggcgcaggacaaaaagtagatgggcaagtgcttgtttatcatgatcttatctcatacggcgtaaatcgtgttccgaaatttgtgaagcaatatacgtctgttcaagaggagattgtgcgtgggatttcacaatatgttactgaagtaaagacaaggcaatttcctgaagaaaaacattcgttcacaatgaaagaggaagaatgcttagcgttatatggaggaaaacaataatgaaaatcgtaactacagtgcaagagatgcagcaaattacgagcgaacttcgtgcaagtggaaagagtattggttttgttccaacaatgggttatttacatgaaggccatgctactttattacgtaaggcaagagaagaaaatgaaactgtagttttaagtgtatttgtaaacccactacaatttggcccaaatgaagatttagatcgatatcctcgtgatattgatagagatgaaaatgtagcaaaagaaaacggtgtagattatttattttatccgagtgtagaagaaatgtatccagcagaacaaacaacaacggtagaagttgtgaagcgcacggacgtattatgcggtcaacaaagacctggtcattttgctggtgttgcaactgtactaatgaaactatttaatattacgctgccaaagcgtgcttatttcggtatgaaagatgctcaacaagttgcagtaattgaagggtttgtaactgatttcaatattccagttacaatcgtaccagttgatattgtaagggaagaagatggtttagcgaaaagttctcgtaacgtgtacctatcacaagatgaacgtgaagaagctcttcatttataccgcagcctatgtatagcgaaagaaagaattgaggcaggtgaacgtaatcccgaaatcattacaaatcttgtgaaagagtatattgagacgcatacgaaaggcactgtagattatgcagatttatatgcatatccgtcattaacaatggtagagaaagtcaaaggaagaatcattttagctattgcagttaagtttgaaaatgtaagattaattgacaatataacattaacagttaaataagggggagcatctatgtttcgcacaatgatgagagcaaagttacatcgtgcaactgtaacggaggcaaatttaaattatgtaggtagtattacaattgatgaagacttaatggatgcagtaaatattgtagaaaacgaaaaagtccaaattgtaaataataataatggtgctcgcttagagacatacgttattaaaggggaacgcggtagtggtgttgtttgtttaaacggtgctgcggcaaggcttgtacaaccaggggacaaagtaattattatttgttatgggctagttacggaagaagagattcataaacaagaaccaaaaattgcagtattagacgataataatcaaattattgaaatgttaggtgctgaaaaagcgggtacgatattataagtagaaaggctatctccattgcggagatagcttttttgtgcatcttttcattaagatgagataaaacgtggtatagtaacattatataaattattgttgtttgaaaggtaagaaattgaggtgttacatatatgagtaagcgttatgtcgttgttgatttagagacgacagggaactcctggaaagatgggaaggataaaattacccaaattgcagctgttgtagtagaagatggagagatattggagattttttcgtcttttgttaacccaaagagagagatcccaccatttattacagaattaacagggattgatgaaagtcttgtaaaacaagccccgttatttcaagatgtagccccgatgattgttgagctattacaaggtgcggctttcgttgcgcataatgttcactttgattggaattttttaaatgaagaattaaggcaagctggatatacagaaatacattgtccgaaaatcgacacggttgaattggctcaaattcttttgccgacagccgatagttataaattacgtgatttagctaagaagcatgaactagagcacgatcaaccacatcgtgcggatagtgatgctcttgcaacagcggaattatttttacaatttttaaatgaaattgaaaagttaccacttgtcacgttgcaatcgctttatgaattaagtgatgtgttccaaagcgatatagctgatgtgctttctgaaaatattttaaagaaagtaatgcacggtaaagaagatatagcggagtatgaaatacatcgaaatattgcgctgaaaaagcggaactattccttaaaccttggagaaacgtgttcatcaaagtttgatgctttcttgaataaaacgatggataaattggaatcacatatgccaaagtttgaaagaagagaaagtcaacaactgatgatgaaagagatatatacggcgttaagagattctcgtttttcactaattgaagcgggtacaggaacaggaaagactcttgcttatttgcttcctagtctttattttgcaaagagaaaagaagaacctgtcattataagtacacaaacggtacaactccaacaacaaatattagaaaaagaaattccgttattacaaaaaataatgccattttcatttgaggtagctcttctaaaaggaagaaagcattatttatgcttacataaatttgagtatgctttgcaagaggaagaaaaaaattatgatatggcacttacgaaggcgaagattttagtttggctattgcaaactgaaacaggtgatcgagacgaattaaatattcctgagggcggaaagttactttggaatcgtatttgtagcgatgcgtatagtccaggcggtatgcaaagtaattggtttagtcgttgtttttatcagcgagcgaagaataaagctttatttgcagatatcgttattacaaatcatgcgttattatttcaagatttttcaagtgaagaaccgttgtttgcttcatgcgaacatattatttttgatgaagctcaccatattgaagaagctgcgagtagaacattgggtgaacagttctcttgtatgtattttcaattggttatatctcgtcttgggacgctagaaacagaagatgtactctccaaagtatataaaatgatgaaaaaatcagagcaagcatctcgttcaactttccgtatgataagttatagtttgaaggaacttaagtttgatgcggatgaactcttccaaatgttacgtacttttatatttaaacaaacaaagcaagagcaaggaacgaataatatgccgctcatctataggtataacgcagaactagaaaaaggtaagttgtgggatagtatcgtcgaattaacaaatcgttttatatatgaattaagaagggtagtaactgctcttgagaagcaagtggatatattgcaaagtaagttagaatgggagatgcatgttgtaacaggtgaatttatgcatttaattgagttgctgagaaagatggcagaatcattacagttactcgtattagaaaagaattcgtatgtaacttggatggagactgaaacgaaagggacgattcattcaacagttctatacgcacagcctgtccatattggtgaaagatttgctgatgaatttttaacagaaaaaaagagtgttatttttacatccgcaacactaacagttaacgatacgtttgattatataaaagaggaacttggtttacatgatttcgctccaaatactttaaaggttccgtcaccatttcgttatgatgaacagatgaaattaatggtttcaacggatgtaccttttattaagcaagtaagtaatgagcgatatattgaatctgtatcggaacatattgcaaagatagcaaaagccacaaaaggcagaatgctcgttttattcacttcgtatgaaatgttaaaagaagcgtatgcgaatttaaaaaataatgatgaattagagggttatttattactcacccaaagtgtgaataatagaagtcgaagccgcttaattcgaaagtttcaagagttcgacaaatcaattttattagggacgagcagtttctgggaaggaatagatattcctggagatgccttaagttgtcttgttatagtccgtctaccatttacacctcctcatcagccgatgatggaagcgaaaggtgagtggctaaaaaatcaaggtgaagatgtattcgctaaattagcgctcccacaagcaatattacgtttcaaacaaggattcggccgcttaattcgaacgaatacagatacaggaacggtagtagtgttagatcgtcgtttgacgagttcttcctatggaaaacgatttctacaatcgattcctaacgtacctctttatgaaggaccattagaagaattgttagtacaattagaagaaccatcaaatgaataaaaatggaagaaaaatacgcctgaagtacttataaacttcaggcgtaaaaaatgtgggtaggaggaattttattttttttacttcttgtatacaaaatgtgttggttttcgacttgaaacctttttttgctgtacatgtcctgctataatagatgggtgatgaagcaggggttgtaaagaatgtactcttattgtaaccgcattgcgttcttctataattagaaatttttgtgtaacggaggagttttttcatggataagaaaatcgaagtactatcaacgacgcgtattaaatattcgtcggatttgtataaaattgttgatagtttaaatcgtacgttaaaagagcaggacctcatgttcggactagcattagacgaaaaagataaagaaacagctgtatttacgatttacagaacgtagtgatacaatgaaaaagtggatttttgcaatcattattgttatcgttgctagcggaatatatggggcgtatgtttataataaagcgatgggaaagaaaattccaaaagagtcgaaatttgtagaaattgctaaagaaaaagcaaagcttacaaaggtgaaatctgttgattattacaacggaaaatctgcatatatagtcgtgcaaggtacagatgaaaagggagaacaacttatcgtttgggtgcctgagaaaaaaggggatactgtagtaaggaaaaagagcgaaggtatttctgaaaaagaggctatacaaagaacaatagagcaagtcggcaatgaaagtaaggaatcaaaaagtaagccgaaagagattatgaaagtgaaattaggctttgaaaatgatgtaccactatgggaagttacatatattgatgatgacaatcgttatagttattactatcttgaatttaaagatggaaaatttttaagacgatatagcattgaaaaatagatgtagggggaactacaaatgaaattagcaaagcgagtagctgctttaacaccgtcttcaactttagaaattacagcaaaggcacaagcattaaaagcagagggtcatgatgtaattggattaggggcaggggaacctgactttaatacaccagagcatattatggatgctgcacataaagcgatgttagaagggcatacgaagtatacaccaacaggtggattacaatcgttaaaacaagaaattgtgaagaaatttactcgcgatcaaggtattgcgtatgatccatctgaaattattgtatgtaatggtgcaaagcatgcattatatacattattccaagtattacttgatgagggagatgaagttatcatcccaactccttactgggtaagctatccagagcaagtaaagcttgctggcggtaagccggtttatgtagaaggtttagaagacaatgagtacaaaattacagcaaagcagctgcgtgaggcaattacagagaaaacgaaagcagttattattaattcaccgagcaatccaacaggaatgatttatagcaaagaagaattacaacagcttggagaagtatgtttagaacatgatattttaatcgtttctgatgaaatttatgaaaaattaatttatggtggcgtagaatatacttcaattgcccagctttctaatgcattaaaagaacaaacacttattattaatggtgtatctaaatctcattctatgacaggatggcgtattggatatgctgcaggaaataagcagcttattaaagcaatgacgaatttagcgagtcatagtacgtcaaaccctacttcaatcgctcaatacggcgcaattgcggcatatgcaggctcacaagaacctgtggaaacaatgcgtcaagcctttgaagagagattaaacatcatttatgataaattaattcaaatccctggctttacttgtattaaaccgcaaggggcattttacttattccctaacgtaaaagaagctgtagctttatcaggatatgcaacagttgatgattgggcaaaagctctattagaagaggaaaaagtggctcttgtaccaggtacaggatttggtgctccaaataatgttcgtttatcatatgcgacatctcttgaacaagtagagaaagcattagagcgcatccatacatttatgaaaagtaaagtgcaagcttaattttatatttcattcatgtaatataaaaaacctccctattaatggggaggtttttttgacggattgtggcaaaaagaaatagctaaaggtgtgttatactagagagcgaggtgtttggtgatgaaaaagaaaatgatgttacagtggtttgagcagggaagcattgcaattccaaaattgcttatgatgcattataaaaaattaggtttaaatgagacggaatttatggttgtacttcatgtacacacatttttagaatcaggtaattcgtttccgactccttcagagatttctgaacggatgacgataacggaaatgaaatgtatggaagtaattcagacgttgattcaaaaaggttttttatcactagaaggtggacaaagatcagaagcgatgatgtgcgaaagttattctttacaaccgttatgggaaaaaatattacatttcttaatggatgaatcaatagaggaagagcaaaaagaaaaaaaacagctacaagtaaatttatatacagtatttgaaaaagaatttggaagaccactttcgccgttcgaatgtgaaacgttagggatgtgggaggaccaagatcaacatcatccaaatttaattcaagcggctcttagagaagctgtaatgagtggaaaactaaatttccgatatattgatcgtattttatttgagtggaaaaagaatggaattaaaacggtagatcaggctcaaaatcaaggtcaaaaatttagagcgaatcaacaaagggcacaacaaatgacaaaacaagagacgaaatttactggaaaagtgcctttttataattggttggagcagtaatataggaggaaaaatatgcttaacaaaacgcaaatccgttattgtttagacacaatggcggatatgtatccagaagcacattgtgaattggttcatgataatccatttgaacttgtaatcgcggtggcgttatctgcacaatgtacggatgtacttgtaaataaagtgacaagaaatttatttcaaaaatataaaacaccagaagattatttaagtgtttctctagaagaattacaacaagatatacgctctatcggattgtatagaaataaagcaaaaaacattcaaaaattatgccgaatgttattagatgactataatggagaagtaccgaacgatcgagatgaacttacgaaattaccaggtgtaggaaggaaaacagcgaatgttgtagtttccgtagcgtttggaattccggcaattgctgttgatacacatgtggagcgagtgagtaaacgattagctatgtgtagatggaaagactctgtgttagaagtagaaaaaacattaatgaagaaagtaccaatggatgagtggggagttacacatcatcgtatgattttctttggacgttatcattgtaaagcacaacgaccgcaatgtgaggaatgcagactgttagaagtatgtcgtgaaggaaagaagcgaatgaaggtgaaataaaggatggaacgagttatagaaataccgaaagaatttcactgtttaccattttttaaagaaagtgtaaatttaattaagtatcatacagacaattcttttgaagagataatacaaaatacttactttatatttgatattgaaagacagtatgagccatggaaggaaattgaaaacagcattccagtgatgttgaatgtatggaaaaataagcatgaagacattgctatactgtttcgaaatagaaataagcaagaggctgagggaccaatgattctttttgcagctcacttgttatcggttgtctattggctaaatgaacaacctgttcatagtttgaatgaaatgcaaataaatacgaataaattaaaagtgcaacctgttaattttatggaaagatattcattcattataaagaaaccgagtaattatcattcttatattcaattagcgcagttgtatatcgaaatagaaaagctgtatgtaaagaaaatgataacaaaaaagaagtccgcttctcgttaagagaaacggacttctttttttgtatattaggactctgttgtaacaacagcaccgtctgcgtgaggtgtatctcctccgggattttggtgttgctgttcttgttgtttcttagcctcttcttcagcttttttcttggcctcttcttcagctttcttcttagcttcttcttcagcttttttcttagcttcttcttcagctttccttctagcttcctcatcagctttcttttgagcttcttcttgctgtttacgttgttgttcttgctgttgctgttcttgttgtttcttagcctcttcttcagcctttttcttagcttcgtcttgttttactttatcttcattagcctttttctgggcttcctcatcagcttttttcttagcttcttcatcggcctttttcttagcctcttcttcagctttttttgcatctggagttccgccaggcgcagtgaaggatgcaccaactgctgggcttgttccagtgccttttttcgctactacagagaagctgtaagtaacacctggtttaataccaccaagagtagctgtcgtaccacttattgataggctaccacttgaaccgtcagttgctttatagctggctgcatatgcatcaacttctgctggtccagaccagtttagtgtaactgtgctagcgccatcaaaagtgacattcagaccactaggagcatctactttaatttgtttaattgcatcttttttcgcaccttttacgtataactctccgtttatttcttgtacagaagaaggacgttcaaagcgtgatttatctgtagcgaatttgctcatcattacttggaacatttgctgtgcaattctagtggagcgatcgctaacataattttttggaccatctttttcgtaaccggtccaaacagccattgtgtattgtggcgtatatccagcaaaccagctatctctgtttgcatcagctgggatgtcatatttttgaagaactgattcatcaaagttttgtgttcctgttttacctgctacgtcaacacctgaaacgtatgctgttggacctgtaccaccagaaccaggttttactacgtcacgaagaacgtcagtaaccatataagctgtatagtcttgcattgcgcgatgttctttcggtttaaagcttttctttttcccgtccgggaaggttacttcttttacgaagtgtggtttattatagttaccactattaccaaaggttgcatatgcacctgctacttctaatggagaactatcgttactaccgattgctgttgattcgtagacttttccttctttaaaggtcatgcctaaaccttcagcaaattcttttgacttattaagaccaactgtttgtgctgtctttaaagctggaatgtttaatgattttttcaaagcttcacgtagtgaaacgtcacctttgtaactctttgttgcattttgtattttcttaccattggaatacgtatactctgagtcgtttaattgatggtatgtagaccattgtaaattttcaattgccggaccgtagtcgaaaattggtttcattgttgaaccaacttggcgttttaaatcagttgccatattatgacctttgaaagtagacttactttctttacgtccagcaccaattgctcgaacttctccagactgtgtatccataaatacgaatgacccttggaattgatcgtccggatacttaataagattgccatccataattttgtcggcgtaatcttgagcatcttgatcaagtgttgtatgaatcgttaaaccatctgaaccgatatttacatcaggatattctttttcaacttcttttacaactgcatctaaaaatgcttgatacttcatctcagttacttctgaagacggttgaaggccctcagttactggaatcttaacggcgttattcatttcttcttttgttatataaccatgtcgattcattaatgataatacgacattacgacgatttgttgctcgttcaacattttccttttttgttggatcataaatgtttggaccttggggtaaaccagcgagcatagcagcttcatgtaattgcaagtcttttaaatctttaccataatatttttgcgctgctgtcgcaataccgtatgaacggttacctaaattaatcttatttaagtacatttctaaaatctcatgtttagagtattgttgctctaatttgtaagataagtaccattcttgcacttttcttttagcagttttgtccatcgttagaaagtagtttttaacgacttgctgtgtaatcgtactaccaccttgggaaccgaaaccaccagtgacattttccataactgcttttgtagttcgtttaaaatcaattccattatgatcatagaaacgcgaatcctcagttgcaagaaatgcattttcaactacttttggaatttgatcataagtaacatgtgttcgtttttcagcaccgtattcatagaagaaatttccgtttttatcgagaaactttgttgataaaggattaacaagtttggatttgtctaattttggagcgtcctttaccataacaaagaaagcggaaacgccggctacaagaccaacgataccaagaagtagacaacctataaggaatttcttgaaaaaggagccttttttctttggtttttcttctttatgtgtttttttctcttgatttttcacatgatttcgttctgtacgagaacgataattatctgacattatactttctcctacctttcattctctcccccaaaagtcgaaaaaagagccttagtgatgactctatcacgaaaaataaaccatgtctagtacacggatatagtcaatccgagggtgataaccgcatgataataaggatccatgctcttctatttcttctttcgtaatcgacttgcgtccaccagtattttgacgattccaaaatgcaataatatgttttgcatctagtaaataaaattcatcaaaaagtgtaaatttaataataacaaatgcaattccattatgagcaacgacttgcttcatatgttcaatttgatgaaggtggaagttttgaagtgggaaactagttttatttttggtttcctttgcttcaaaatcgatgtatttccctttgtatacaccgttgtaatctgttgtagaaggttgtttaaaatacgcttcttttaccactgcagcacttcgagcggggtaatctacttttacaatttgaagaggtgtaggctttttatgtacacatgcaatattatgggttaagtaatattgatttgtttcattcaattcctcttcaagggacatacctctattactataagtatgtgtttttataggtgttttttgaggttgtgaagcttgattatacctttttccatttgggtaacgaatggtcatagtgtgtccacccccaacttgctaagaattacttacaaaggtgattatatcaaaaaatgaaaaaagatgtgacctttttgatgaaaggtatgatgacttatttatgtttacatggaatgattatatgaaaattaaacaaaatcgagaaaaaaatttttgtgcagaggaagaaaaagcaatcattcacaatattaaaaagaaaacagaaatagctaatgtggacaatatttctcggacacaatcttatcaagaatattatttaagaaatagtgaaatcaggtgggcctttttagcgagtatggtttcgagaaatgcgggctggaatatgactgatttagaagggagatattatgctactgttttacctagaacggtaaaaaaacatttatttcttctgtacgaacaggctaattggattatttttttagatgcatttcctcagctattattgtatgaggaaagtaagaagagacatgcacctctctttcatttgttgcaatacttcaacgtatcaatttttatggaaaaagaatggttacttttctgggaaagaagagatacgaatagacttatgacagcgcttattataaatgaacaaaataaaattcaaaaaccagtcattgagaatacatattttaaaaaacatgtattccatactgcactttttaaagtacaagaaagacttcatattagtgcagttatcttcccaacaattgaagggagaatgtatgggttttcggtttatcaatttgaaacgttacaaaagcgtatagaactaggaaaaaaattagcatggttattgtttcatccaatttataatggttcgttttataagtttgcactgcaaactacacatactgggtctagagaagattatgaagtttacgcaaaggaaactcgaaagtcttatacgccaacacttagagatatttatcctgttattttacatgaagaaataaaaatgagagattggttttgtgcaaatatgaaaatgaatgtgctatttgtacttgaagaacctaaaggggaagttaatataacagaatggtatagaagaaagagagaacaaatctataggctatctatcgtaaaccgttttgctaaaaggatcgatgagttcatgatataataaaaaagaagtcccgtcttccattttgaagacgggacttcttaatttgaaaaaatcctgctatgcgtgctacaactttaatttcaaaacgtaatgctagtaggagattaaggatgatttgaaatttaaatgttcgtaataaagtctcgctttatgtagcagggaagtttggaccatctagctttggattgccagtctcgggtttattttgttgtttgttttggtttttctttttttcatttttgttctttgccattgtaatacacctcctttttgtattgttaccatttctataaatgacatacgaaatgatttctttgacgaataacaactagttttgtcatgtgggcaggagtggtgaatcatccggcgaaattacatgacaaaggaaaagcaaagaaggaggcgttttgtatatggcgatggttcagaaggaagatgtaatgaaaaaaatggatcaaatgttaagttctctcgatttgctggaaatgaatatagggattagaatgaatcatgcattaaaggatgcgagtgaaaaaatatgtaataagatagaaataacagaaatgcatattgaacatatggaaaataaattagtgcatcacgaagaaaaagggaattgggtgaagacatttcaaaacgtcgtagtgagtgcataataaggtgggaaagaaatgaagaatgaagcattaatacagtcttcagaaaaactcatgcagtatagtaatgaagcgaatgtaaaaaaaagagaactaactgaatacgatttttataaggatatgaaaccgtttgtagatatggtagatgaggaattaaagaagtggaaagaattagcttatacgtggattaaagaagaaaagccaaagtatatacatgtacagcaaattgatcaagtatacgataatttacaaacgaatgtgttgcaatgctttgtaaataaaggtaaaggtaaacgattctttgaaacacaccaagccatttcgtatactttgcaaaatatagttgagcaatgtaaataacaagagggagagccctcttgttatttttatgcttctgtcattgttgtaggttttgttgcgccgtttatttctaattcttttattaatgttcgataatctgatatgcatatttttccttcgagataccaatgtctcgcaaagtctaataattcatttgcattctctgtgcaatacccctttttttgagaaaacgcttgttttaaatcccctaataccatgttgattcctcccccatgagaatcttcttcttaattatcatagcatggaagggttttcttttttaattttttaaaaatttaaacttccgacaaaaatagacatatattccatcacacatattattttataggtacatattatatatgtagaaacttatgtgaaggaggagagaatgcatgtttcaacaacctaacgtatatcagcaaacgaatccatatgcacagcaaaatatgtaccaatataatacggatacatatttacggtataatatgtatcctttcgagccttattatggaaatcaaaattattatcaaccgtttgaagtgtcctttatgaatcaagctcaacaaccacaacagcagcaaccttatgtgaatcaagctcagcaaccatacatgaatcaaccacagcagcagccttatatgaattcgcaatattatatgccaccaccatcgccgtatgctaatcaacaagcgatgttttatccaccaaaacaaccgtacccgacgcagggtaagcaaaagcaacaacagccaagccagttttctagttttgtttctcaatttaaaacatcagatggtaactatgatgtaaataaaatgatgaatacagctggacaaatgatgaatgcgatgaatcaagtgacaggtattgtaaagcaagttggaggcttttttggtaagtgatgttgaaggattgtctataaaaacaatgtaaatgaaataaaggactagacaaatttccttgtaataaatgggtatatataacaaacggctttctctcttttctcatactgtaaagtgtaatcagatttttttaacgagagaggagagaaaaaactatgcatcattgtcatccttgctttggagggcataagcctacaggacctatttgtacgactgctcctgtcattcatccgacgaaacaatgcgtaacacactctttttcaacaacggtggtgccacacattttcccaacacatacaacacatgtacatcatcaacaaattaaaaaccaaaacttcttcccgcaaacaaattcaaatgtaaatgttgtggacccaatcgacccaggattcggcggcggatgtggaccgtgtggccatggtcatcatggacatcatggacatcacgtatcaccatttggtccaggaccaaatgtatctccgtttggaccaaacgtatcaccattcggaccgaatattggaccaaacgtatcaccattcggtccaaatatcggaccaaacgttggtggaatgtttaaaaagtaaatgatatgttagaactagcgaaatgctagttctttttttgtaattggagtgttgatatgaaagttattgcagtaacaggatataagccatttgaacttggaatatttaaaaatgatcatccaggggtggagtgtataaagaaagcgttacaccgtaaattaaccaattttgtagaagatggtttagagtgggttataataagtggccaattaggtgtagaattatgggctgctgaagttgtttttgaaatgcaagtagaatatccagatttaaaattagcggtattcactccgtttttagaacaagaagaaaattggaaagaagataatcgtgaatattatgaatttatcctttctcaagcagaccatgttgatagtatcacgaaacggaagtatgaaagtccagagcaatttaaattaaaaaatcaattttttattgaaaaaagtgatgcgcttttagcggtatacgatgaagaaaaaccaggaagtcccaaatatattgtagaagcagcaaagaaaaaaggagaaatagaaaattatcacagttatttcattcttttttctgatttacaagatataatagaagaggaacagtggaataatgcagagtaaatatgtaatatagtactcgtatatatgattgacaaaaagcattgtttctgaaaaaatttagttaatgaaagttttggtaaaaatttgaggtgaagaaaatgatttcggataaaattaaattaacagcgaaagatattttagaaaaagaatttaaaacaggtatgagaggttatcagcaagaagaagtagacaagtttcttgatatgatcattaaagactatgaagctttccacaaagagtttgagcaattaaagcaacaaaatgctcgtttaaagcgtgaattagaggaacaaaaactagcagtaacgcaagttccacaacaacctgtacaaacaccagttgcacaaccagtttataacaacacgaatacggatattttaaaacgcttatctaacttagaaaaagctgtatttggaagtaagttatacgaatgatgtaaggtgggaaaaggtttaagcattttacatagaaaaaaacgttgcaaaatctttttgtttccactatactaatggatgtcataacgtttgggtaatcgctgcaacgccaacgttgtagaggaaagtccatgctcgcacggcctgagatggctgtagtgttcgtgcctagccaattcataagctagggtattctggctgtaaggctggtttaacggcagggaaaaaacctaagtcctttcggatatggtttgactacctttaaagtgccacagtgacgaagtccttgaagaaatgataggagtggaacgaggtaaaccccacgagcgagaaacccaaataatggtaggggaatcttttccaaggaaatgaacgacgggaaaggacaggttttataacctgtagatagatgattgccaccggagtacgaggcgtgggccgtttgtagtacaaaggaacagaacatggcttacagaacgttatgaaccaactatgaaataactcagctctcctttgttagaggagggctttttatttgtatgaagttataaagtatgagttaaaatggttaatgagaaaaattttcgtaaaatgtaatgattaataggaccaattgctattaattattgtttgaatatacataagaggtgaatgcaaatgggaaaagttactttaattgcaacagcggcaatgggtattgaagcgttagttgcccgagaagttcgcgatcttggttatgaatgtcaagtagaaaacagcaaagtaacatttgaagcagatgaaaaggcgatttgtcgcacgaatttatggttacgtactgcggaccgtgtaaaaattaaagttggcgaatttaaagcaacaacatttgatgagctatttgaaaaaacgaaagcattaaactggggagattatattccagagaatggcgaattccctgttattggtaaatctttaaaatctgaattattcagtgtttcggattgccaacgtatcgttaaaaaagctgtcgttgaaaaattaaaaacaacatataaacgtacaacttggtttgaagaagatggtccgttattccgtatcgagattgcaatgctaaaggatattgcaacattaacaattgatgcgagcggtgttggacttcataaacgtggataccgtatggatcaaggggaagctccgttaaaagaaacattagctgcgtctttaattaaattaacaaactggaagccagatcgtccatttgttgatccattctgtggatcaggtacaattccgattgaagcagcattaattggacaaaacattgcaccaggatttaaccgtggtttcgcatctgacgagtggggctgggtaggtaaacaaaactggcgtgaagctcgtcaagaagctgaagatttagcgaactatgatcaacaattacaaatcattggatccgatattgatcatcgtatgattcgagttgctcaagataacgcagaagaagtaggcttgggcgatttaattacatttaaacaaatgcaagtaaaagatttcacaacaaaagaggattatggctacgttgtaacgaatcctccatacggagaacgtttaagtgaaaaagcactcgttgaacaactgtacaaagaaatgggacaagtattccgcccattagatacatggtcagcgtatgtattaacaagctacgaagcatttgagaagtgttacggaaaagatgcgtcgaagaaacgtaaactgtttaacggatttatccgtacagattactatcagtacttcggaaaacgtccaccgcgtaattcatagtataaaactcctccagcgcgcatatactggctattatgtaatgcgtaaaggaggaagtgatatggataatttccaattatcaatgattcaaaaagctattcaccgtacgtatgatgagctcggaaaagaagtggatagtcaagatgcgattgtagatgaaatacaaaaagcacaagaagaatatttgtcagctctttcacatgaaacagcgattgataaaaggtatttaaagtcattaatatagaagaaaattttcctttttcgaaaggaaaattttttttcgtgtatttatatgtatggcaacaggagaaagtagctgcacacatataagtagcggttactatatctttttatagaaaaactttttggttggaggctaaggatgtttactgagaagagattaccatttgaagtaggaaaacaagacaatttttatgataagttgaatgagtggattggagatgtgttttacgacatccttccggaaaaaggttttgaagagcgtgatgaacaaatttttatggcgtttcaattagagcgtgctttccaagaaaagaaagttatgttcgcagaagcgggtgtaggaacagggaaaactattgtatatcttctatatgcaatttgctatgcgcgttatactggaaaaccagctataattgcttgtgcagatgaaacgttaattgagcagcttgtgaaagaagaaggagacattgcgaaattatctgaagcgttaggcttatctgtagatgtaagacttgcgaaatcaatggataattatttatgtttacgtaagcttgaagatgttatgagtggacgagctccagaagtaattgaagacgtatattatgaattaccacaattcgtatttgatcatggtacgatgcaaaactttactcactatggtgaccgaaaagaatttccactattaaatgacgaagaatggtcaaaagtaaattgggattacttccaagattgcttcacttgtgattctcgtcatcgttgcggtcaaactctttcacgtgaacattatcgtaaagcagcagatttaattatttgttctcaagatttttatatggatcatatttggacgtacgatgctcgaaagcgtgaaggacaaattccattattaccagaaagtagttgtgttgtattcgatgaaggacatcttgtagaatatgcagctcaaaaagctttaacatatcgtttaaagcaaacgatgatggagcaacttttaacgagattattacaaaacgatattcgtgaagagtttgcacatttagtagaagaaacaatttggcaaacagagcgattctttgatgtgttacaagaaaacaaaaaagaaattgccggttctgatcgtttagaaattactgtgacagaaaaagtaacagctgaagcaaaacgactttatgcgaaaattggtgaagtcggtgatgcgttagtatttgaaagtgaaatgcatacagtaaatacgtatgatttaaatatcgttgatgaacatttagatgtattagaacattcacttcgtctattcatgcatgagaaaaatgtaattacatggggtgaagaaggtgatggagccttcacgttagtaattatgccacgtgcagttgaagaagtattacaagagaaagtattctcgaagaaaatcccgtatatcttctcatctgctacattatctaataacgattcattcgcatttacagcaaatagcctaggggtaaaagattacttatcattctcagttgcctcaccatttgattatgaagagcaaatggcagtaaacttactatcgcatacgaaagaaaatgagtgggaaagaaagtgtcaatatacacttgaaaatatacagaaaacaaacggacgtacacttgtattattccgtacaacgcaagaacttgcagcgtttaaagaatatgtaagtaaagaacaaatgtcagttccgttcttatatgaaggggatcaagaaattagtcagctcgtttctcgtttccaaaatgaagaagagactgtactttgtgccgttcatttatgggaaggtttagatattcctggttcatcattatcacatgttatcatttggtcattaccattccctccaaacgatcctgtgtttgaggcgaagcgtaaacatgtaaatgatccattctgggatgtagatgtaccgtatatgattttacgtcttcgtcaagggattggccgtttaattcgtacgagcgacgataaaggtgctatatcaatcttcttatctgatacagaagatgagaaagtggtagaagcggtgaaaaacgtactaccggtagaaggtaaagaattataaggagaaagcttggcgcttgccaagctttttttctattataaaaggaatttagatttccgtgtcgaattaagtttgaggtagaaaagggaggtttttatacgatgacagtagctacatatgaagtagaaaaacaatttttaacatatgtgaagaagatacaaaattacggagaagcattaagtttaatgttttgggacttaagaacaggggcgcctaaaaaaggtgttgatcaacgttcagaagtaattggtatgctttcatccgaagtgtttgctatgtcgacttcagatgagatggggaactatttaacagagcttgaagctttaatacgtgaagataaactttctgaaacgacgaagaaaatggttgaagagtgtcggaaagaatatgatagaaataagaaaattccacaagcggaatacgaagcgtatgtgaaattagaagcgaaagcagagagtgtgtgggaagaagctcgcgaaaaatctgatttcgaaatgttccgcccgtacttagaaaaaattgttgaatttaaaaagaaatttattacatattggggttacgaaacatataaatacaatacattattagacatgtatgagccaggtattacagtagaagttttagatcacgtatttggtcaacttcgtgagcgcatcgtgccgcttgtaaaagaaatctctgagtctaaaaaaggattaaaaacaagtgctttatcggaaaatttttcaaaagaaaaacaaaagaactttacattagaactattaaagcaattgaattatgactttgaagcaggccgtcttgatgaaacagtacatccattcgagattacattaaatagaggggatgttcgtattacgacacgctatgacgaaaaggatttccgcatggctgtgtttggaacaattcatgaatgtggtcatgctgtatatgaacaaaatatttcagagaaatttgaaggtacaccgttatgtagtggaacatctatgggtattcatgagtcacaatcgttattctttgagaactttatcggccgtaataaatcattctggaagaaaaattatgatttattaaaagagtatagcaatggtcaatttgatgatatgtcagtcgatgaattttatgatgcaattaacgaatcgaagccgtcattcattcgtatagaagcagatgagcttacatacccgcttcatgttatggtgcgttatgaattagagaaagaattatttgatggtacattacaagtgaaggacttaccagcagcttggaatgataagatggaagcatatttaggaattcgtccggaaaatgatgcgcaaggtgtattgcaagatgttcactgggctggtggctcatttggatacttcccatcttatgcgcttggttacatgtatgcagcgcaatttaagcaaagaatgttaaaagacattccgaactttgatgcattattagaagaaggaaacgtaacaccaattcgtgaatggttaacagaacatattcaccaatatggtaaaacgaaaaagccacttgaaattttagaagatgtaacaggcgaagggttaaatgcaaattacttagcagattatttagaagtgaagtataaagaaatttatgagttataaaaaagagctgcttacttgcagcttttttttatagggggatagaagatggtttatacatatacagtaatgacgcaagaagaggcggaagagattgcatataactggcattataaaggggaatattccttttacgatatagaggcagatgaagaagatttagctgagtttttagagggtgagagtagagggaatcatgtattttctgtgaaagaaaatggtactctcattgggttctttacggtttgtaaaataaataatggaacggttgatataggacttggaatgagacctgatataactggcaatggatttggtttacagttcgtgaatgctggactagcttttagcaaagaaaaatacggatgcaaatatataacactatcagtagcgacatttaatgagagagcgataaaagtgtataaaagggcgggatttgaagcggttggaacgtttatacagaaaacaaatggtggttgttttgagttcttgaaaatgaactatatatgtaaacgtgattaaaaaaacagagggatcttctgtttttttattttgatttagaaatatatgatacatattttttactttttgtaattgagagttttgaaattttggtagagggtgtgtatgatagaagtttagtagcaaatagtaggtttagcaaggaagggtagaggtagtatgattacaattaaaacgaaaaatgaaatagatttgatgcatgaatctggaaaattacttgcttcatgtcataaagaaattgcgaaaatgataaagccaggtataacgacacaagagattgatacgtttgttgaaatgtatttaaaaaagcatggtgccacatctgaacagaaaggttacaacgggtatccatatgcgatatgtgcatctgtaaacgatgaaatgtgtcatgcgtttccggccgatgttcctttaactgagggtaatattgtaacaattgacacggtagtaaacttaaatgggggtctttcagattctgcttggacgtatagagttggaaaagtttctgatgaagcagaaaagttgttgttagtagctgagaatgctttgtataaagggattgatcaggcggtaattggtaatcatgtaggagacattggctatgcaattgaaagttatgtaacaaatgaaggtttttctgtcgcaagagactttacgggacatgggattggtaaagagattcatgaagaaccagcaatttttcattttgggaaacaaggacaaggacctcagttacaagaaggaatggtaattacaattgaaccgattgtaaatataggtatgcgatattctaaagtagatttaaatgggtggactgtacgaacgatggacgggaaattatcagctcaatatgagcatacaattgcgattacaaaagatgggccaatcattttaacgaagttgtaattgggaatgaaagagtttgcaaaactcgaacgaaaatagtggtttttaaaaatttgtacgtgtttttttgataaatgcttttcaaagcataaaaagtacgttataatccttctataaaataaatagttagctacactcatataatcgcggggatatggcctgcaagtttctaccgaagtaccgtaaatactttgactatgagtgaggacgaatataattgcttgtttagcattctttttttgcgaaactccaaaagcgcgtctctcacttgtaacgagtggtggcggcttttggagtttttttattgcataagagggggaacaaacatgaaagtattacaagaaaagattttgaacgaaggaaaggttttatctggtgacgtattaaaggtagatgcttttttaaatcatcaaattgatccagtacttatgcaagaaatcggaaaagaatttgctaaacgttttaaagaagagaacattacaaaaatcgtgacgattgaatcttcaggcattgcaccagcagttatggctgcattagagcttggtgtaaaagtaatttttgcacgaaaacgtaaatcgttaacgttacaagataatatgtacgttgcaaacgtatattcatttacaaaacaagaaacaaatgaaatttcattatctcgaaatcatatcgatgaaaatgatcgtgtattaatcatcgatgactttttagcaaatggtcaggctgctttaggtttaatgagtttagtagagcaagccggagcgagtattgcaggaattggaattgttattgaaaaagcatttcaagatggaggaaagaagcttcgtgaacaaggcgttcgtgttgaatcactagcagaaattgcatcacttgataacggcacagttacatttgtacagcaagaaactgcggaggtgaaataaacgatgaagcagcatccatttaaaattgcatcgcttggtatgcagcatatgcttgcaatgtatgctggagcaattatcgttccgcttattgtgggcggtggacttggtttgaatcaaaaagagttaacatatttagtctcaattgatttattaatgtgcggcgttgcgacaattttacaagcattatcaaatcgctttttcggtattgggcttccagttgtgcttggttgtacatttacagcggttggaccaatgattgcaatcgggaaacaatacggcgtgtcttctatttatggagcaattattgctgccgggttattcgttgttatttttgcgaaattatttggaaagcttgtaaaactgtttccccctgttgtaacaggatctgtcgttacagtaattggagttacacttgttccagctgctattaatgatatggctggcggagtaggaagcaaagatttcggaagtcttgaaaacttagcgttagcatttggtgtgttactatttatcatcattatgtatcgtttcttcgacggatttattcgttcaatctctattttgctaggtttattgttcggtacaatcgttgcagcatttatggggaaagtaagcttgcaagcagttggagaagcagattggttccatggtattcagccattttacttcggtacaccaacatttgaattgacgccaattattacgatgattttagttgcttgcgtagggattgtagaagcaacgggtgtatattttgcattatctgatatttgcaataaaaaaatcggtgaaaaagaattaacaaaaggctatcgcgcagaaggattagcgatggtgttaggtggcattttcaacgcgttcccatatacaacatactctcaaaacgtaggacttgttcaattaactggagtaagaaatcgcgttattatttatacttgcggtggtatgttaatcgtacttggtttcattcctaaaatcgcagctattacaacaattatcccaaaatcagtactgggcggtgcgatgttagcgatgttcggtatggttatggcatatggtattaaaatgttaagtagcgttgattttggtaaacaagaaaacttattaatcgttgcatgttctgtcggaattgggcttggcgtaacagtcgttcctacattattttcacaacttccagaaagcattcgtattttaacagataacggaattgtacttggaagtgcgtcagcagtacttttaaatatcgtatttaatatggtgccgcagcgcaaagtgaaagtagaagaagagccagtatctatgcaaagtgcagtaagagaagcgtgaaaaagcaaggtctcgttatgagaccttgcttttctttttaagtggcattattttcccgtacgtaccaagacgccaaatgtactcaagtggcccgtattggtaatgtgaaagccaccagcggctaataaagatttgtaacgtgtagaaactaatgcagaatattggtccaacccataatggagcaggataataatttttaaggaatagaccaaatacaagtaatgtaacaattgtatgcgagatgtaatttgttaatgccattcgtccaacgtattggaatggacgtaataatgtttgccatttttctttttgtaataaacgcattagcgtgaaaatgtagaatatgaataacgtttttccgctaaacattgtaaagacctgcatataaattggttcataaaatggttttgataagaagtaacggaccatgaagaaccacattggtaatgttaaaaggaacataataatttgccattttttaagttttggatctaactctttcgtgcggcggaaaatatcctttttgccggcgtataaaccaagcaaaaatagcccaactgtttctggaagcataagtaaatttaatccaattccatcagcgtaaaatgcatggaaacgattttgtatttgtgacagccagtcttctaatggcatgataggtaaggaaaaacctagctcttcctttggtaccaatgcaaccgtaataccagccattagcataatgaattgaaaaatactcaataaaacgatagcccatattaaaatagtacgaggttctctcttataaaataaaaataagaaaaatccagcaatcgcataagtatgtaaaatgtcaccgtcccataaaagaacgtaatgtaagaaaccgaataataataaaataagtaagcggcgaacaaacaaagtttttgggcggtcggttttcgcctcagcacgactcataaaaatataaaaacctaatccgaataaaaacgaaaaaattgtataaaatttcgtttgaataaacatatcgtaaaataggcgaatatagctgtctatcccttcgtaaattcctgaaagatcacgtgagtcaaccccggcgataacaggccaattcacaagaaaaatacctagtacagctattcctctaataatatcgatggagtgtatcctctcgccatgtgtgagattttgcgtcatttttttcctccttgttaagtaattcccttttattatacaaaatgtaagatggaggggataggcgatatttccatttttttaaactgttaagttatgtaggataagatataataagagtgcacaataagttttaccctttttcaaaacaggcagtaaagctccttcttataaggagctttctttatgaaaagtgttgataatgattctctttaatgataaaatatatttaaaattgataatcattatcaaaaaaggttggtgcgtaagtatggtatatacattagtagcaggtacagtcgctgtatatgcagttattgcgaagtatgttttaaatggagtaggaacagcaaaatgagtgatatgacataaaatccctttcatttgtaaaaagaatgaaagggattttttatttttaatgagaatatgctgaaaatttagtatgatagtaaagtgaaactgtaatcaatgggtaggtgtaactctcactggttatgagctcgcaattagcgggaaaaagtatatacatcttggataaaggggaacaagggaatgacaaacatagtacagacaaacggtatgaaaaaacttgtttgtttttatgaagagtggcaaaaacacggcgatgcagagaatagtttaaagttgtttgaggtgattcaaaaatataaacaagaacagcttatgatagcgttctgtggtcacttctctgcggggaaatcaacgatgatgaatcatctatataaagcgcagctgttaccaacaagtccaattccgacaagcgctaacgttgtcaaaattgaaaaaggaatggatcgtgttgttgtaacggttaaatctggagaacagtacgagtatgacggtgcatattcagctgaagaattaaaacaaatttgtaaagatggtgatgaggtaattggtgttcacatttatcggaatgatgcgccaattcctgaaggtgttatgttagtagatacaccagggattgactcaacagatgatgcccatcaattagcgacagaatcaacgctacatctagcagacgtaattttttatatgatggattataatcacgtccaatcggaagtgaatttgcaatttgttaaagaattgaaacaacgtaataaaacggtttatctcgttgtcaatcaaatagataaacataaagaaaatgaattgtcgtttgagaattataaagatagtgtaaagcaatcgttctctaactgggatattgaagtagatgaagtatattatacgtcattacgaatgatgaaccatccacataatgaaattggaagcttagaaacgttaattacatctatcatgaaagaaaaagagcggtatgtaagagagggaatggagagagaaacagaatatttaatgggggaacatttctcgtttattctttctgaaaatgaaaaagctcttttgaaatatgagaaagagttagcatcaccgctttctatttcagagatagttgaaaagaaagcggagctaatggaaacgaaacgtcgcgaggctagtaaagagtctcatgtgagaaatgaatttataaaaggcctacaagctatattagataacgcgtatttaatgccatttgaaatgagagaattggcaaatgcgtacttagaaacgaaattaacaaagtttaaagtcggtttgctatttgcgaaaggaaagacggagcaagaaaaacaaaggcgtgtagaggcgttttattctgcccttcaaaagactgttgaaacgcagcttgattttcatgtgaaggaatttattgtagccttcttaaaagaagaaggattgttcacggaggaaattgggaaagacatatatgggttagaaattgctttcggaccagaaatgttggctgaggtaattaaacaaggcgcaggtttcacaggtgattacttacttctttatacagcggatgtagcgaatgaactaaagaagcgttattttataaaagcacagcaaatttttgataaaagtgcggtcgttttaaagcaaaaggtgagggaagcagttgctcgtattgaagaagagattgaaacatatacgatgttgcaaacggcgaaagaaacacaattacaatacaataacaatttggtggcatatgaagactatttacgaaatgtttggcacgatcatgttgctacgcctgaaggtttgcaaatagatgagatattgcaaagggaaaagcaaattgttagtgagaaatttacactacaagagcaggaaatcgtaaacgataacgtagcgattcatgaagaagagctgaaaggaacggcggctttaaatattcagcggatattagagaaagtgaaaaaagctgaaacgatattagagccattgccagcgctgaaacatgtacagcaagaggtaatagagaaaagaagacgtgtagaaacaaaacaatttacagtagcgttattcggggcatttagtgctggaaaatcatcatttgccaatgccttactcggtgagaaagtacttcctgtatcaccaaacccgacgacggcaacgattaatcaaattttgccggttacagaggaaaaaccacatggaacagtaattgttcagtttaaatcaaagcaagcgttattagaagatatgaaagctgtttataagctgtttcattatgagattgctacgttagatgaagcgttagcacaaattgataacgttatgaaatatccttcaccaactgggaagcaaaaaacaacatttagctttttacgagcggtacaaaaagggtatgatgcagtttctacttatttaggagaacaagtacaagttacattagaagagttctctgattatgtagcgaatgaagagaaatcatgcttcgttgagtatatggaactttattatgattgtgctttaacaaggcagggagtagcgcttgtagacacacctggagcggattctatcaatgctcgccatacggatgttgcattccagtatattaaaaacgcagatgctattttatttgtaacatattataaccatgtattctctcgtgctgaccgtgaatttttaattcagcttggtcgtgtaaaggatacttttgcccttgataaaatgttcttcttaattaatgcggcggatttagcagagtctgaagaagaacttgaaatggtaaaaggttatatcgcagatcagctactacaatacggtattagaaatccgcgtttatttgcaatttcaagtttatgtgcgcttgaagagaaacaaggaaagaatgttgaaaaagagaagtatggtattttacaaaactctgggattactaagtttgaggaatcatttacgtcctttatgatgagagatttaatgcttgtttctgtgcatgctctatatggtgcgttgcaaggggcagatcagcttttagtaaacatgataaagggtgcaaagcaggggaatgaagagaaagagaagcaaacgaaaaaatatgaagcagagcgtgatcaactacttcatatcatttcttcatatagtgtacttgctgaagaacaggcgatgcaaaatgaagtgaaagagttgctttattacgtgcaacagcgtctattcctccgctataatgatgtgtttactgaatttattaatccggcatcacttcgaacggatggaaatgtgaaaacacaattgcaacagtgtgttatggaattagtagcatttattcagcatgatttattacaagaaatgcgtgcgacatcattacgccttgaaaaatggatagacgaagcgatgaagcgtgcaaaggatgaaattgtagtgaactgtaaagtagaaaatgaatcaatttctatgaatggaacagtggagtatgaatacaaagatattacacataaagaaccgttcccttcagttgaaataaaagatttcaaaaaagcactggcacattttaaaaatgagaaaagcttttttgaaaagaatgacaaggcttttatgcaagaagacgctaaatctgtattagaaccgctcgtatcaaactatgtagctgatgaaaaacatttatttgttcatcattataagcaagagtgggatatgaagtggaatttattcgaaaaagtgatgcagcaagatgtgatgaactattatgaaagtatattgtttgcattggctgaaacgatcgatgtatctctatatgaacaaagtaaagaacaattgcaaaagcagttagtagagattgaaaaagaaatttatgttatatagtcgttatgagaaaaagattcgttcaattttcttttgaagtacagtatctaaagattttacaaatccagcaaattcatcggtagaaatcatatgagtaagaacgagtcgtctgccatctggtgtttcaccgcataagacgaatgaagaaaattcatatgttttgttttcaactactaattttggataggaatacgtgtcgcttttcttcttctttccatcaatagagatgacgttgcattttttctcattgttgtccatggtgaatccctcctttctattatttatggtagacaaggagggtttagaacaatagagaagggggaattttttatgtctgttgtaatagaacgtattccaaaagaggctataccgaaggctttattgttacttgctgatccaagtgaacggcaaatagctacgtatgtacaaagaggattaacatacgtagctaagcagggggggagcgttatcggtgtatatgttcttttggaaacaaggccaaagacgatggaaatcatgaatattgcggttgcagagcatttgcaaggaaaagggattgggaagaagctattaaggcatgctgtagaaactgctaaaggatatggtatgtcaaaacttgaagttggtacaggcaattctagtgtttcacaacttgctttatatcaaaaatgtggatttcgtattttttctattgattttgattacttttcgaagcattatgaagaagagattattgaaaatgggattgtatgtcgtgatatgatccggcttgcaatggaattgaataaaaacgtataactatttagggggaagagaagatggaagtacataaagcaattacagcacattctcgtaaacaaaatgaaagtgtaaaagcatgtttacaattagatgcacagcgtgaagcagctattgaagctgccgtatctcttgcgtcaaatgggaaagaattttcggttgatgtcattaatgttgtaacgaagcagattaatgatcttgcaaaaaatggtgttaccttgcagcgtaaatatgttacagaagaaatggttatggaatatgtaagtcgtttgaaagagaaagaaggtcgttaaagatgatagttacagtcgaatggttacgtgagcatatagaagatgagaatgtccgtataatcgattgtcgttttgatttagcgaatcctaattggggtagagaaaagtatgaagaaggacatattcctcatgcgttatattttgatttgaatttagatttatcaagtcctatagcagaacatggtggccgccatcctttaccaaatattgaggagtttgcagacaagctttcgaaggctggtattgatgaacatacgacagtaattgcgtatgacagtcaagccggtgcaaatgctgctcgtttatggtggttatgtaactatgtaggacatgagaaagtatatatattagatggtggtttccaggcttggaaagagaatggactaccgacaacagcggaaattcctgttgctatacgaaaaacattcaaagctaatatacaagatcatatgcttgtaacgatggaaacggtcagagagaatatccgtgcaggtgcggatgttacattaattgattcaagagagcccaaacgttatgctggtgtagaggaacttgtcgatcataaagcaggacatattccaacagcggtaaaccatttttggaaggatggaatgttgcaatcaggacaatttaagaataaagctgggcaacaagaacgattccaaaatctgtcgaaagataaggaaaccattgtatattgtggttctggtgttacggcatgtccaaatatcgtcgcattaaaattggctggattccaaaatgttaaattgtatgcaggtagctggagtgattggatctcttatccagaaaatcaaattgcaaaagaagaagattaatcacttgcatgcaaaaataatttgtattaaaataaggtcacaagcaagagattgctcgaaaaactttgtattttacacattggaaacaatgtgataatataacgacaagtaaataatacatcctgcggtgtgcgtaacttatttatgtctaaaaccgatgttagttatacggaagctcaatatttagcgaccatcatcaagccttccttgtggaggaagatgtacggtaactgtgagggcatccacctgcgagtagcgggtttttggacatttacgaggagcggcacgtgcgggggtcttatttcaactaaccttatataaaattcctacggtgtacgtagcttatgcatgtcttaaaccaataagtttaatatggaagttcaatatttaaatgtagctaacatgccatctttttaagaaggaagttacaaacatttgtgagggcatccacctgtgagagcaggtttatggacatctagagagaacggcatatgtggggctatataaaaaccttacgttttatacgtaaggtttttttgttgcatagatatattaatattatcttgattcacctgtgaagtttccgtaataaatgtagcactttctgtcttcatcagtctctcttgaatccaaggagaattccatagaaatgccgtctcgctgaatatatataatatctgaatgaagagatggtaaaatttcttcgtagttccatacatcttgactatctactaagcttgaacttgtttcacttagttctctaatttcaaaaccgatgtgggagtatgtagggtctgaagggtcattggcgaaaacttctttttgaatataaataactgctgttccgtctgggtcaaccgaagttgcagtaacaacataagtatttttctctttaataaaatattcacaagtcatgcgtgcgataatttcagaattagaaatattggcgtagttccataaagcaggataccctttcgtttcatcattaagtcgatattctaagcgcattttatacctcttcttcctttttcttctactttatcatgccatcctatataataggaatagaatttaaaaaggggagtgcgaaggtgacaaaaacgaaatggctagtaggtggtgtcgtaacgtctttaatgactggcactttatttggttgcgcacaagatcttcccccaaaaccgaatgataatagttgttctgattgggattgggatgatgaacttggggtatggcagtgtgatgatagtagttcaggttatcgtgggcattatttctatggtgggcgatactatcaaaataaatccacttttaaaaattcatcggcgtttaaatcgtatcaatcgtctactgaatttaaaggtggaattggaagcggttcaaagggaggatttgggggctaaaatatgtcgcaatacataagggatcgaaaagaattttatttaaaatatccgaatttttggtcggatttatatgaatgtgagtatagtttgtttcatgttttttctataacaaatcagactttggaccaattacacttagcgactgaacgaatgggcaaaatattttttaagactgctagactgctgcgtaatctaagtgacgaacagcttctagatcttggctttccatccccgagtttatcattcattagaatgaaagggctttatcctgaatctgtaatttcgcgatttgattttgctgtaacagaggataacaaaatcaaaatgcttgagtttaatagtgatacaccaacttttattgtggaatgttttcaaatgaatgggaaagtatgtgaaaatctaggctatgatgatccaaactcggatcaagaacgattgctatcttctggtctaacgaaagcagtaatggaagcgacaaagggattagataatccaaatgttgtttttacagcacatcatgaacatatcgaggattggaataccactatgtatttaagtcagctatgccatgttgaaaataaagtagtgccaatgtcagaacttagaattacaaaagatgctctagttgataaagatggggcgaagattgatgttttatatcgccaaacatatccgatagaagatttaattgaggatcaagatcctgaaacaggagatttggtaggtgtggaactgctgcaacttgtaaaagccggaaagctttttataataaatcctttgtcagcatttttacttcagccaaaatcaattcagtgtcttatttgggggttagcagaagaagaggtcttttatacaaacgaggaacaacagtggattaaagaatatatgttacctacatatttagaaccagatttatttttaggaaaaggttctttcgttcaaaaaccttcatttggtagagaaggagatacaattacgattcgcgataaggatgaaaatattatgcttcaaaatgcacatcaaacgtataaaactgcactgccgatatttcaaaagtatacagaactgccagtcgtatccttggaaacagaaaaagggatggagaaactgtcctatgtgtttggttcttttttaattgctggaaaagcgagtagtatcggtattcgcgcgggagaaaagattacaggaaatgaatcgtactatttaccggtaggtataaaaaggagggggaaaaatgattaattttttattatatttagcagtaacacttggacttttatgtattggtctgttcttgatggaagtgacaacgaaagttaaggaatttaagttaatggctcaaggtaataaggcggtaagctatgtgcttggagggcgattacttgggttagctatcgttttatattcgacagcagctaattcaatttcacttcttgatatgatttcgtggggagcagttgggattttggctcaaattatcgtcttttatttagctgagtggcttacaccacgctttaatataaacaaaagtctcgaagaagataatcaagcagtcggtctttttcttatgtttttatcgctttcaattgggattgtaatcgctggttgtataacttattaaaaactttacgtttaaacgtaaagttttttattttatcccgctatttgccgggcagcccgattggtgagggctaataatcagtggcggatgaacaaaacccccactgattaaagtttcactttatatacgttagtttgccataccatttgaaaaaattgtaggctacggttgacatctattttaaataagagtaacattttcaatgtaatgaaaataagtctctgttaggtgaggctcctgtatagagaaatgctactgcccaaaaatgtcgagagacgccaatgggtcaacaggaatgatcgaattaaggtttttcttaacgtagctggtaatgtacctatgctatacagtgctaaaactcggtgagggagaggtccgtagatttctaattatattagaaatcgtttatttgtgtatgtaatggccgctactctcttaagggtaggggtcttttttgttaccaagctatgagtaatttcatattataaactataaaattaaacgaggaggtgaggagcatgtcaaattctgactcggttccgttacccatatacttcaaatcaaaaatatatgatgtaggcaggaaacgatttgttcctccctctatatttatcacaatatagcgtttataaagcgcgagacactttcacagtaaagtggataaattgagaaacaaagcgtttcttcctatgttgtaaaggaggagacgataatatgttatatgcaaacaaaactgtgggtaacacgtcatataaactaagtaaaaaatcaataaaagaacaaacaatgctccaaaaaaataaagatttattaattgaaattgcaacaagagatgtaaaatctgtatttgcatattttaaaacaacaagagacggactatcaatgaaagaggcacaaaaacgtattcaagtatatggccgaaatgaactaacttcaaaaagagcacttcttgcagaagtaatgatgaagctaggtggcatgattccaggtttttcaaaacaacgtgtgtgtgatgaattacaacgtgaaacgattactgtatctagagtagaatgttctagtagtacagggctaaatagtgaactgaaaatgatggagatacctgtgcaagaacttgtacctggagatatgatttttctttcggctggagatgctgtgccagctgatgtacgtattatttatgcagatgatttattagtgaatgagtctgtgttaacgggaaacgaagcgaatatagagaagtttgagagctgctatcaccttgaacgtaaacggtttattccattaaaacggatgaaagattataatccacttgagcttgaaaatgtatgttttaaaggttcgcatattgttagtggaaatgcaaaagctatcgttgtttctactggaaaaaatacgtattcaggcatcttgcatacttgttgtagtagaacgtcttaatgtgttaatgatgctaaatatacaaaaacaatgtataatagacaaagttgagcaaaaacgtagaatggtaatctatttatataaccttacgtgataacgtaaggttattatttttttaataggagaggaattatgaaaaaagtattattagttgatggtatggcactattatttcgtgctttttacgcaacaagtgtctacggacaatttatgaaacgacaagatggaacccctacgaacgggattcatggttatatgaaacacttattaacagctacgcaagcgatcgaaccaacacatatcgttacatgctgggatatgggaagtacgacatttagaacagaatcgttctcgaattataaagcaaatcgtgcagcgccaccagaagaattaattcctcaatttgatttagtgcaagaaatgactgcaaaattatccattccagttatcggtatgaaaggctacgaagccgatgattgtatcggtacgcttgcaaaacaatattgcaatgaagctgaagtttatattttaacaggtgatacggatttacttcaacttgttgataagagcgttacagtcatgcttctgcgtaaaggaattggaaattacgaatattacacaccggagaaaatcatggaagaaaaaggtgtagagccgtggcaaatcgtccacgcaaaagctttcatgggagatacaagtgataattatccaggggtaaaaggtatcggtgaaaaaacagcgtataagcttattcaagagcacggaacagtatccgctgtactagaaaatgtagaatcattaacaaaagcgcagcgtacgaagattgaaagtgatttagagaacttaaatatttcgttacaattagcccaaattcactgtgaagttccaatttcatgttcactagaagaaggattacacacaatggatgaagaaaaacttagatttgtttgtgaagaaatgaattggggaagacctgaaatattaataaatatgctataaatagtttgggaagagggatgttgcataagtcgaactttgacttggtgacaccttctttttgtttttgtaaacagtattataataaataaaattatgtcgaactcaattttaaatatataaatatttcgacaagatataatgataaaagttgatgaaaataataacttttatcatgaagtgaattaatttcaacatagttttagataatcattttttcgtgttcacaaagttgtcagaaaataaacgagattttcatatgaagttcaaatagaattcacaacaatcaattattataagaacacacagataattctttatcttttatataaaccatcccccaaggaggacaatgaaaatgagaaaaaaagtgagaaaatcttttaaacaattattaattgaaaataaacaatcactattaaataataaagaaaatatgaaagaaattgaagagagaattgagaaacgacatgtagcatatagtggtgccagtaattaaataaaataaaaaagatagcctatgtaggctatcttttttattttatattgaaaaaacgctattcagctctttaattttgtaaatatgcaagatatttttatagcgtttttctatcaatattactcatttttcgaggttgaaattggtatataccaatttttgagattttctattcaaaatattacaaaaaatgttacaatacactcaaatttatactataaaatcattttaatatgaaaaattggaatgaaaagaaaggagaggaatatgaataaagatgtcgctttgaaatgattattatcatttcattaggagttgatgtaaaaagatgaaaagatacgaagaattggactctataagagggatttcttcattagtagtaatgattggtcatcatttaatgattttttcagcatttcaaaattacagttatgaagataataaaccatttgttgtgtatctattaaaagaaacgcctgctcgtctaatttttagtagtggtaacgaatcagttattatcttttttgttttgagcggatttgttttgtatgaatctattcaaaaaaactatagtagctatgggtcataccttttaaaacgtatatgcagaatatatattccttatattgtggcaataattatagctattgtatgccagattacaattagtgaatatggtatttcttatttaagtgaatggtttaatcgctcatggacgattgaaagttcttcaagcttaatcgcacaacatattttattggttgggaaatataatacagatgcatataacggtgtgatttggtcacttgtccatgaaatgcgaatatcaataattttcccgttaattttgatgatttgcttacgaaaaacgttaaggtgttcattactattattgtttagttttagtatatgttctgtcgtaatattatttttgtttcgctcgggcttaacattaacaagctatgcattaacattgcattacacagtactgtttttactaggagcactagttgcgaagtataaaaataatttaatagttttttatagtaattgtactaaaaacacgaaaattgcatggtttttatttgcgattttactttttatgtatgaagggcttataggagaaattaaagtgctcaataattttatatttcgagactacgtagtggcgataagtgcatgtttatttgtcatattaagtttgtcaatatcaactttgtcgtccttgctacataataaatatttgttatatttggggaagatttcttacagtctttatttataccatattatatcgttgttttcccttatatacatgctccatgaaatattaccgttgcctattattttaattttttcacttgttttttcgtttatacttgcaatgctttcgtatgtatatgtagaaaaatttgcattcggagtcggaaagtatgtaacaaaacaagtggatagaagagagaaagggttatctgtaaagagtgaattgcaggatgttattcagaaaagggcggtgaaataattgaagcaagaaatgagtataaaagattttcaacaattactgaaaagaagattcgtaacgattattttaacgatgtgttgtttaaccgcttctttagttcttatctctatgtatgttttaaagccgtcatatcaatattcaacgcaaattcttgttgggaatttagatgagtttaataaggaaaattcaacaaataaaacacaagaaaataagcaactagtaacatcgtatgttgatattttaaaaagcccattaattatttcaacagtcaaaaaaactttgaaattagagcaatcaagttatgaattagcacaaaaaatctcggttgtgaatacggacaactcacaaattgtaactgttacagtaaaaggttccaatccgaaaatcgtgaaagacattgtaaagacattggcagagcaatcacaaaaaagctttcaacagtacacaaatgtacaaggggtgaaagtattaactgatcctgagttacaggaacaggctgaaaaattgtttccgaaatttcaactgatcattcctatttctttaattgttagtttttttgttgggataggtttagctgtatttcgagattattttgatgaacgtatatacacggaacaggatttagagaaaataacaacagtctctgttattggtcacataaatatggaaccaaatagaaaaaagaaacctacagaggttgataaaaaatcatctatatatcgaggtgaacatgtcgatgtttaggacaaagaagcagctgccattcaatttgcatgatgatctgatgaaagagcagttttatacggtgtatcacgagctgaaaaaatccggaaaacaactgttcacagttagttcaacgaaggacagaggtgttgttgcctcgcttatagtaaatatgggtctagtgtttgcggaaatgaaaaaaaaggtgttacttattgatgtgaatttttctgatcctaaactacatgtattattacaaagtgatcacatgataacagtaaacgatataataagctcttcctcctgcaattatgaatctttttctagtaatttgtctaattacttatattgtattcctgcaaaaaaaacagtacatacagggacgcctttagttgctatggatgaatttgataatgcgattgctaagtggaaagaagattttgattacattttcgtttattcttctgaagtatttgagcttcctgctacgcacattattgcagggaaatgcgatggagtggttttagcagttaaaaagcgaaaagattcactacgtacagtgcaaaaagtaatagcggatataaataggaaagaatgtgaattaataggtataattttatattcttgaatgtgggggtaacgatccatgattcgtgaaacaaatcaagccaagttgtatacgattccggctcaagaaaagcctagcatattgaatcgaagtgtaaaacgcttgtttgatattatattttcaatcatattgttactattaacaataccaattatgttgttcttttgtattatgattaccttagaaacatcaggggctccaatatactttcaagaacgtttaggtataaacgggaagaagtttaatgtatttaaattaaggtcgatggtaaaggatgctgaaatgaacggaccacaatgggcaaaagaacatgatcaaagaattacaaaagttggattgtttataagaaaaacgagaattgatgaattaccacagctcttaaacattttaagaggagatatgtcttttgtaggccctagaccagagagagagtttttttataatgagtttgatgcgtatattccagaatttaaggaacgtttaatagtaaaaccaggattaacaggatgggcacaaataaatggagggtataatcttgatccaaaggaaaagttgaggctggacatggagtatattgaaatgaaaacatttcggacggacatccgtattttatgtaaaaccgttttaattgtattgaacggtaatggtgcaagataaatatatatgtaaacaaacaacatatgtaagtaggttacttgcaaaggagaacttgtatgggtagatctattctaagcaatattatccatctattttatagtacgattttagctaaccttcttcaggccgtcagtttaattgttttagcaaacttttttaacgcacaacattatgggatgtttagtgttgccatagcagtgacgtttgttatgttattttttacagacttaggacttagtaatacgtttcttcgagaaggggcaaaggatggagcagatttagagcagattttatcatcgtatataaaaataaggatgattctacttatttttatttctatcatcggttatattgctattcattatatgtatgcggataaaaatttaatttatatgatgataaacgtaatgtttttcatgttaataggattaacttggcaaaacatagggattgcctattttcaactgacggaacgtatgaagtatatagcgctcataaaagttgtatcagcatcagttgtcattataattacatgtttttgtattttcggagagttaccggtgtatgtaacagctcgcttatatgcttttgggtatatgattggtggtttattcagtatatatatcatgagaagaaagacgaaaatgaatatgaaagtcgtaattcataaagcgttattttggcaattaactccctttattattagcggttttttaataatgagtacgccacaattagcgcctatcttgcttaactatacattgccattaagtatggtaggtgtttttgcagtggcgtaccggatgccggcagctttatatcaagtaccaggggtaattgcaggtgcattttttccggtgctctttaagcattataaccagaataatatagaagagcatacgaaattaaatttacttcaaattaaatcaatggcgattgtaggaatatgtatgacgatcggtttatatcatttagcaccatactttatttctatattttttcatgaagaatggaggaatgcagtagaaccactccaaatattatcatttcttattgtgctacaaagtttaaatattgccattgctgacggtttaacgacgagtggttgtcaaaataagaggactgttgtgcagtgtgtagcattggtgataggtggggttatgctttatagctttagtagtcttggtggagtgataggagcggcatacgctatggttttatttgaaatagtcgctttagtgggatatatagcggtaagtgtagtgaagaaaaaaattgtattccaaattgtaataccgtatacaatttattttggtgtaacctttattggagtgcaatatatattgcatacatatcatttaattgcgcttgttcttaatatactaattgtagtagctgccatattcctatatgattatgagctaaaaaaacttcttctttcttttataagaaaaatacgcaaaaaggattatattacgaaacaggggatatagcctatggaaaataatatgaaagtatcaatgggatggattattcttctaatattatttgtcatgttaagtaaatacaatttatatattggattttcattgaagatatatatgatttttttagtcatatatttttgtttaacaattaaagactttcatattcaaaagttatattttcatgaagttatatttttactgttttatttcatttattgtttaagcggaattctttctatgtatttaaatgctagtattcgtatgatttttggcgtgctactcgttttaggatgctattttataatgagaaatttattggggaatactgaaatagtggtacttgaatcatctattgcttatgtaggaatagtatttaatgttgtaagtctactactctatataatcggtttacaatactttagtttatacggtggagaagagagagaaatttttgctggattattagttgatagaggatatccacggttaattggattgctagatgatcctaacatttttattttctataatacaatattttttatgtactatatgacgaatttgcaaaatatcacaaacatcttagggttaattttatgtgttacgacgagtctattaaccttttcaagagggggaatattagcgcttgtgcttgtcatttttgtatatatatgtatgtctagtttcgctaaaaaaataaaaataattatgagtttagtattgtttagtgtagttatttttagtttatcgaatagtgtaatggggggccaattagatgacatattaaataaacgaatttctgatttttcccatgataatggaagtggtagatttacattatgggaagctgcttttaaatattatttatccaatccatatatcggaattggtgcgtttaacttctcgaattattatgagtatcaatttaatgaaaaattatatgtacacaatacatttttagaaattttgtctgagtcgggtacaattggttttcttctatatagtgcgtttttattcatattaatgtttaagttagcgcagcatactttgtttcgtgaaaaaccataccttctattgactatgattgcatttttatttcagatgatgtcattgtcactcattattaacgaagcgttctttttatttttagcagttgttgtgaagtatatttcaatatatgaaggaaggggaaagatagatggtaaaatgtctatcagcacataataaggcgcctcatgtttctgtaataacaccttcttataatagtagacgatttataggtgagacaattttatctgtacagaatcaatcgtatgaaaactgggaaatgattatcgttgatgactgttcaaccgaccaatctgccgtaaaaattaaagagataatagaaggagactcacgtattaggttattatcattaaaagaaaatgttggtgctgctaaagctcggaatttagcgattcgagaggcgagaggaaggtacattgcctttttagatagtgatgatatatggttgccgcataaattgaagacacaattgttatttatggaagaaatgaatattgctttttcatatgcgtcgtatagtttaattgatgaaaatggtaatgaattaaatcgcgaagtgagtgtaccaaaatctgttgactatcattatttagtaggaaatacaattatcgggtgtttaacggtgatgattgatcgtgaaaaaattccgtatgtcgaaatgcctagtgtacagccggaagatacagcgttatggctgaacttattacatgaagggcatgaagcaaaagggatacagcaagtattagcgaagtatcgaattgtagcaaattctgtttcgagaaataaagttagagcagcttttcggtattggaaattattaagggaccaaaaaagtcttaatgcagtgcaaagcttttactattttagtaagtatgcttatcatgcttataaaaaaaataaaatcaatgtagttgggaagacgcaattatgaatatactgttgatgactgataaattgataactggcggagccgaaaattatttctgtaaattagaaaataatttgcattatgaggattttaagatttatacagctgcaggtgatggagaactatatgaatcccttactagaaaagaaaattttatcttacttagtcgatggaatcatttgagaaatatttattatttacgaaacgaaatttgtaaacgaaagatagaacttattcatgcaaatagtttgcgaatggtattatatgcttttctacttcaaaagtttattaaaaaaaagatgaaaattgtttatacgaaacacaatgtaacgatattagaaaagaaaatgccaacgctttttcggtatttcatgaataaatatgtgaacaatattattacagtaagtgagtttgaaaagaacaatttaatttcaattcatgtagcagaagaaaaaataaatacaatttataacggtgttgatattgaaaagtttttattccagcagaaaaagaaagaatctacatataaaatagggatattagctagattatccaaagagaaaaaccatcaactatttgtcaaaattgcaaatgtgttgaaaaagagaaatgattttatgttttatattgctggtgatggaccagagaaagaatcgattatgaaagaaatagaaaaatatggattgcagcaaagggtgaagatgctagggaatatttcagagccgcatgagtttatagggaatatggacgccttacttttattatcttttcgtgaagtgtttccaatggtagtaattgaagcgatggctacagggacaccaattgtttcaatagatgttggtggaatacatgaagcggtaatagatggagagtcaggtgttttgatatctgaatattgcgaatcagaattcgcaagtgcgcttgaggaactacaagggaatgaagaaaaggtaactgctattagattgaaagcacgagagaaagcaatgagatatttctcgttaactaaaatgatagaggaaacgaaaaatatatatgaattaaacaaatgaccgagtaggtcgtttgtttttttttattatagaaacttttaagagacaactcacatattatatgaaaaaggtaatatgaggagtgaatttattttgtcagaatatatttcatcccaagaagattgtgcgccagaaagtagcgttcatattgattgttttggcgcagttccaaactcgggaaatgatagctcattagcaattcagcaagctattgattattgtgtagcgaatcgaatttcgacggttagaattacagggataaatacgtacaaaattgtaaagccgattgttattaaatcaaacgtaagattagagttggatcctaccgtaacactgcaaattgatggggattttaatgcatttgagctacaaagtaacgcttcgatagttggtggtactcttcaagttataaatccattgtttcaatctgctgttatttatgtttctggttcacaacaaatcgaagtacctaatcaatctgttatatcaaatataaatataataaatacaactccatcgtataaaggaaaagctatacatttttattgtcaaaaggcatgggattttattagtttctttcaagttaaatttattcaaattaaaaactttcaaactgcaatacatttgaagacagaatatataaatgatatcaatacaccttgctggattaacgccaatgtatttcaatctatatttattgatggatgtgtgtatgggattgaagtagatggaaatagtgatttgccaaatgaaagttcaggaaatacgtttcatgatattcaagtgcaatgtagacaacaaacggaaaaagtaattcgttgttcaggtgcgtataatacatttgattgtatgatctgggatacgtaccggatgagtagtgaacaaattgttattgaattttcttccaattctcatcgtaactaccttttttcaaatctgctttcgacaactattgtagataaaggacaatacaatgtttgtaagtctacttatgaagaatccctacgaattcagttacctttgacgttaaatagacctcatttaataggaaatcaagatgatattttagtaaatgctcagcagaaatataacgttaagcaagtaagtggaaaagtgccgtacgggggaaatctcacaaattgctttaatttaatagatgaacaaagtgtaaactatattgacgttccagatagtaatccagttgtaattgaaatggattttacgaaaaaaccaatacaaatgttaaattgttttggaatgtattttggatggggagagagcccaaagaaaattaaaattgaatatgcattaagtgcaactggaagttgggttatcgcgttggatgttccattaaatgttggcgatacaattatatcgaatatgaaggccagtcagttatataaagttagaattacattaagtggttattctcaagatcataaacgttttcgaattaatcgtatctttgcaagatcttctatggaaaatgggagtgcttggttagcgacgactggcggaagaatgtttggagatattgaaatagaggcaagtaaaggtataatcatgaagactgctagtggagtgaaatggaaagttactattaatgaagctggccaacttattacgactaaaataacttgagatggtgtttaatcgtatatccttggacgagttacaacgtagtgggatataggtaatgaaaaagagattgtaatttggtttcaaccaaactacaatctcttttttgtttcaattacttccaccaaatccaagtccaaaggtaatttcgtacatttcgaggagtaatgcgaatgaagcgttcaccgtcaaagaagcaatttaaatttggaagtgcttcatctggattttctggaacaaaggtgacgatgttttcgttacttgtaacggttactgtaattggttggtcggtaggcgagacttgaagttgtaacgaaatattggccgtatttttaaagggattattaacaggggggcttatcacttgtactgtgaataacacgataattgtttcgtttggttccaaattagtagcgactaggaaaccgatattcggattcgctagtggagagcgttcaccgttaataaagacagtgccatttataaattgtaaacctgctggaatagtatcttgtaacgaaatatttgagagtgaaatttcagaagtatttgtaatgcgtaccgtgtaatcaaaatattgatttaaataagctgagctgacggaagcatttttcgtgactgttgcagttataaattgaactggtatacgaacgatatttgaattaacaatgaaagtaataattggatcctgtggtgtcaactgaaaagcagcggtaactgttgcagaatttataattgtactgtttgaaagaatagaagttgcgagaacttgaaatgttatagttgctactgtacctgcagataaagaaccaatattaataccagtgtctggacgaacatttggaacgggagtgccgttaatggttacgctgttttctataaatgttgtaccagctggaattgtgtctataacagaagtactgattgtaggaattggggaatgattgaataccgctaatgtgaatgtaatgatatctcctataacgacaatagatttgtcagctgttttttcaatgcgaaccatcggatcaataactgtcgttgtaacggtatttgtttgttttgtaattgtaataggtggttttgttggatcaatgataacggtataggaaacagaagcatcattattaattgtagattgaagagtagaagaagatattgtcacttggaacgtaataataacaaattcattaggagcaagatttcctaacgtaataccattttcaggattctcattaggctgattgattccgttaatcgtaacactaccagcaacaaaagtcgtatctattggtacggcgtctatggcaagaaggtcttcaatcgtcacattaccgctattcgtaatcgtaattgtatatgttaaagtttgaccaggtaaggcgtttgttacatcagcagacttaaaagcaatgacattatcattttggacagtagttttgacagtatttgttgtagtcgtatttgtaacaggtacgttatttgggttgactatatagttaaaagtagtaattgcgttgttgtttagttcatttggtgttggaatagaagtcacagttacttggaatgaaacgatagcatctccaccaatagttatagtaccaattggtatgccgcttactggattcactcctggaagagtttctccgtttacaatgacgctattttctataaacgtagtaccttgaggaataatatcttgaatgattacatcatttactgcaacattaccggtttgatttagtgtaatcgtatacgttaacgtatcaccaaccgttgcaaatgcaaggtcaacagctttattactattcaaattcgcatgattaatttctgttaaagcagctgatgaaataatagtttcggtaataggtggtcgatttggtaccgtgtattcatattcaattgtactcgtgttagagattggatttgtttgtggaatcgaagtaacccgtacttggaatagaatggttgctgtcgtattaggcggaatgttatcaatttgtataccgttaagtggattgtcatttggccgagcgttgccattcacgataacactattctctataaagctcgtatttgctgggatgatatctgtaacaataatgttttctacttgtatattcccattgtttgtaatggaaatagtgtaagggataatagtttgtaggtcagcatattggataggtgttgtttttgtcgcaattacattagcagaaataacttcagtgaaggtaatattgctagtggatatttgttcttccacgtttattgtataacgagaagttgattgattttgaacatggccgctagcaggaagagctacgacggtaacagaaaatgtgactgggatagaaatattaggagcaatcgttcctacaagtatacctgcacttgggttggcattaagctgaggaatgttatttactaaaacgctaccgtcaataaaggttgttccattaggaatattgtctgtaaatacaacagcagtggcatccgtattccctgtattcgttaaagttgttgtataagttaaaatgtcaccaatcgttacagaggttaaatcaacagttttaagtgaaacgatgtcagcatcattaatttgaacaaaagtagtattggaagtagtagatttttgaattggtgcaaagtcaggattgaaaataaagtcgtagacgacgtttgcagtattaggtgttggatttacagcaggtaaattcgtaacggaaacttggaatgttattgtagccatttgacctgctgcgacattaggaatggaaaagccgatattcggatctgctgcaggaagtacagtattattaactactacacttcctggaataaatactgttccatccgctatagtatctgtaaaaaagatggagttagttgtagccgatccattattttgaatgaatactgtatattcaatggtttcatcaatgttagctaatacagtattagtggactttgtagtaataagaatagcatcaataaattgtatgtttgtagcattggaagaggtcgtttctgaaattggtggtgtgcttgggtctggtcgatactcatagtgaatgacggcgatattattaatgttattttgtggcggtatagagactacgcttacttggaacgtaacaataatcgtattatttggaagaattatatcaagattgatacctgtaattggattttcgttaagtcttggtacgccatctacaagaatgctatttggaacgaatgtggtgccagaagcaattgcgtcaagtaggagagtatttgtaataggtattgtaccagcgtttgtaactgcgactgtatatgtgatgatttgaccgatacgtgtaatggatctgttagcggatttaattgcactaacatttgccgtccgcacttcagtatttactgcatttgataacgatctacgctgaataatttgagaactagggtcaatttggtattcgtacgaggtgtctgaaatattaatgactacattgccaactggtatatttgtaagttgtacttggaatgaaatagtgactgtttcatttggttgtatcgtgccgagagttactccgttttcaggattagcgccaggctgaattacattatttattgctaagctatcttcaataaatatagtaccttctggaatgttatcaatgaacacggtattgttagctggaacggttcctatattttgtagtgtatttgtgtaggtaataatttgcccgattgatgcgaaagttatatccgcgcttttaacagaaataatatttgcgttttgaagtgatgttgtaacaatgttagaatttgcagagcgattcactggtggggctgtagggatacttacatattggtaagttgctgaagattgatttacaatttcggtttcagtaggtggattatttgtttgcacttgaaatagtatcgttttggaactgttagctggaattgttccaatcggtattccgttttcaggatttacacctggctgaaggacaccgttaattgtgacactatcgggaacgaatgtagtcccagctgggatagaatctgtgaaaacaatatttattgcgtcaacattaccgatatttttcacttcagaaatataaagtatagttccgccaatatctacagttgttggattggatgtttttgtaattgtcaattgtgcttgcacgaaatttgtaatgacgatattactagtagatgtttcagtaataggcggttgccctgggtctggttggattgtatatgttgtattggattgatttgtaatcgattctcgcgagaatgaatctttaataagaatttggaacgaaataaggtgagtagcgtttgctgctaaggtaggtaaagtaacacctacatttggattggcaccaagtatagctgttccattaagtgtaaaactattttctacgaatgtagtatcttggggaatcgtatctgaaaatatgagattcgtagctggaatatttccggtattttctagtgttattgtgtaagtcaaaatatcacctgttgttgtttgaggtgcattgactgcttttaaagaaaggatagttgcatccgaaatttgtgtgaaagcgggattagacgtaattgttcgagagatgataggagcagttggatcggcgataaaagtatagtcaatacgggctgtattagaaaattgggttcacgcttggtatagattgaacgataacctggaatgttacagtgacgatttctgacggtgtgatggagtttaatggtattcctacgttaggatcggcacctggaacagaaacaccactaatggtaacgctattcggaataaatgcagttccttctgggaccaaatctgttaaagtaactgtatttgcagtagtatttccgttattttgaacgactactgtgtaagtgattgtaccgtcagtagattgtacgagagaatctgtacttttaattacggataacgatgcatcaacaacagctgtattaaccgtattagacgaggatgttgctgtaacaggaggttgacttggatcgacaatatacgtgtaacttgtaagtgcttgatttataatcgctccttgcggtggaatagaacttgcaagaaattggaacgtaatagtagcggaatcacctggtgcgataataccaactggaataccgagagttggacttgcatctggaagtgaaatcccgttgagcgtaacactatttggaacaaataatgctccttcaggaactccgttaatgagtaatatagagtttgcagggaagtttccagtattcgttaatgttgctgtatacgtaattacatccccgatagatacaattgaacgatttgcttgtaaaacagttgtaacagtcgcgttattaatttgtgttgaagcgctattagaatttatcgtgcctgtaacaggaggagaggccggatcaacgatgaatgcgtattgaatagatgctacgtttgtaatcggatttgaaggtggagtagatgtaactatgacttggaaagtaacggttaaggaactacctgcgctaactgttccgatattcactccgttatttggatttgcgcctggaatggtacttccatttacagcaaaactattttcaacaaaggtcgttccagttggaactgggtctgagaaatttacattcgtagcgtttgtattgccgttattttgaatcgaaactgtataagtgatcgtatctccaatatttgcaaaggctgtattagcagtttttacagctgaaagtatggctgtattaatagaagtaacgaagacattcgtttccacattgccaggctgagccagtaatgcattgcctacgttatattggaagttaacaaatcctaagttttggagttcaggtgtgaacgttgttggattacttacgatttgtacttggaatatgattgtaacagtttgatttggactgattgtatttatgccaacaccgttaataatcgaagcggatggtaatggagtgccatcaacaataactgatcctgcaacaaattgtgtccacgatggtaaagggtctgagaatatagcgttgttagcaggaatattgcctgtgttcgtaatagtcgttgtatacgtaatcgtatcaccaatcgttgcaaaagttttatctcctattttaatagtatttaaaatagcactttcaatttttgttgtaacgttgttagaaataatattttttgaaactggaggattagctggattaacgatatgttgaaagctaacgctagcttgattagtaattggatttataggcggaatttcattggcgataatgtgaaatgctacgatgacagattcgtttggcgcgatatcaccgattggaacgcctgtaatgatatctgcatttgggatgctagttccgttcagtgtaaagctattcggttcaaaggaagttccgtctggaataaggtcggtaaaaataacattcgttgcactcacatttccgttatttgtaattgtaacggtgtaggtaatatcctgcccgatatctaccgtagatacatttgaatttttttgtgcagtaaggatagcgctattaatttgtgttgtcgttgtattagattgattggaagttgtaataggtggctggctaggatcaacgacataatgatatgtggtagaagcagagttagaaatgggattaagtgttggaagtgtaataacagttgcttggaatgtaacgattgccgtattaccaccattaatggaaccaatatttacaccagttgataaatcggcgtttggaatggtttgcccattagctgtgaaactatttggaacgaaacttaaattgctatcaagaatatcgataatagttacatcagttgcggtcacattcccggtattaggaaggttaagtgtaaatgttattgtattaccaacatccgcaaaagtaagatttgctgttttggtgctaataatagttgcgttgtttatttgaaggagtgtagtgttggaagtagctgcacttgaaacgggaggattaacaggatcaacagtaaattcatacgccgttgatgctttatttggtgctgggttactagggggaatattgtttactgtaatttgaaagacgatgctatatatttcatttggtggaagtgttgcaagtaatacacctgtatttggatccgcgttaggttgtaaaacgccatcgacagttaatgtgttaggaacaaatgtgagtccacttggtaatgcatctgtgaatacaatattagttgcatcggtattgcctacattggtaatagaagtagtataaaaagcagtttgcccgatatctgcaaaggatacactttcatttttggtcatagataatatggcttctttaatttgggttgaaacaggattgctaattgaagtttctgcttcaggtggtgagactaattgatacgatgttgatgagaaatttacaattgggtttgcggttggtaatgatgttacagtaacttggaacgaaactgttactgtagtcccggctgttattgtcccaatattcacaccgttcgatggatccgccccgctttgaggaactccattaatagaaaatgtgtttgcaataaatgtagtgatgcttggtacggtatctgtaaatataacattttgtgcggatgagtttccattgtttgttaaaacgacagtataagtgagtgtgtctccaatacgactaaaggatttatcgacttgttttaatgaaagaatgttagctgtattaatcgtagtaaacactgtgtttgaagtaacgtttcttgaaacaataggtgcattgggatcagcgataaatgtgtaagaagcagtagcggaattggcaataggattttgaacaggggtagaagtagcggtcacttgaaatgctatagatattgagctgttaggggcaattgatccaatcgttatgcctgtattaggattcaatccaatttgtgtgagtccatttattgtaacgctatcagtaataaatgttgtaccatttggtataagatccgtgaaagtaatattagttgcatttgtattaccgttattcgttaaaattgtcgtataggttatggtatcgcctagtgttacaagggtttgatcgaccgattttaccatcgttatcatagcatctaatacaggatttgtagcaatattcgttgaagtagaggtagtagcaggagcgctgtttggatcaacagtataagaatataaaattgtgtcattacccataattgaactggaaggggaaacggaaataacatttacttggaaagtaacagttaccgtttcaccaggagcgatatttggtatatttactccaagtgctggttgcgcaccagactgctgaacgctatttattgtgactgaatttggtataaaggtagtgttagctggaatagcgcttgtgaaagtaatattcgttgcggctgtatttccggtatttctaatagtagttgtatacgtaatcgtatctccaactgaaactatagatttatcagcactcttttttgttgttaaaattgcactattaatagttgtcgaaaccgtattagatacattcgtttgcgatacggcaggttggctaggatcgaccacatgtgcaaattgtacagagctataattagaaattggatttatacttggaatgtttgtaacaagtacgttaagagtaatcacggccgttccatttgggtttatatttccaatctgaattccgttagctggatttccgatttgctgtgtaccagaatcgtttgtaagagtgccagatatgaatgtcgttccatcagggaaagtatccgtaaaaattatattttgtgaagtgacatttccagggttatttaatgtaattgtataagaaattgtatcgccaattgttgcgaaagttttatttacagatttgattgccacaatttccccagaatttatttgtgtcgaaaccggattggacgtcgtacttcttgaaacgagtggtaagtttggacctgtcataaattgataattaatggaagcgctgtttacaaccggtgagtttggtccgcctggtccaattgtgaaaattggatttggaatgctaactacttgcacacggaaggtaacgtttataaaatctccagcaataatatccccaatcggtatcccattcgctggatttactccaggcaataaaactccgcctactcgaacgctatcttctataaatactgtgttatttggaatgggatctgtaaaaatgatattcgtagcagttgcgtttcctatattatccaataaaacagtatacgttaaaaatgaatttccaggtgctacgtcagaaaatagtcgatctacacttttcgttgcttgaataatcgcttcgttaatttgaactaaagttggattacttgtagctgtttctatcaccggcggctgggtaggatcaataatgatcgagtatgttgtgctagattggttcaaagttgggtttgtagctggtattgagccaacgatagcttgaaagctaattgttgtcgttcctccaactggaattgagtctaaagagattccgctatctggtctaaatccaagttgtgggattgtattaatttgtacgctatcaggaacgaatgaaagttcaggtggtaatatatcgataaaaacaggtgtgtttgctgaagtatttccgctattggtgaggatagttgtatacgtaattgtatctccaacagcagcaaaagcactgcttgcagtttttgttgcgataacggaagcagtatttacttgtgaaaaagttttattagattgaactgttcgtgaaactggcggttcatttatatctacaataaagctatattgaagcgatgatttgttcgggattggattcgggtttggaagtgttgtaatgtttacttgaaaactgagtgtagcagatgcatttgaattcaagttaccaatattgataccgttttgtggatttgcattagtaatagttgttccatttaccgtaaaactatttggaataaacgttgtaccatttggaattacatctgtaaaaataacattgtttgcggtagtattaccggaattagtaatggtagaagtgaaagtaagtgtatctccaatagtagcgaatgttgaattgacagttttatttatagaaagagtagcatcaataattggagtaaccgttgtattcgtaattgtactattgacggcaggtgattggttgggattcacggtatattcataatttacaagagcattatttgttaatgtgccactaggtggtatcgctaaaatttgtgcttgaaaagtaataaatacagtatcccctggcgaaatatctgccaagtgaataccaagtgatggatctaatcctggttgtgggacattattgatcgttacggagttttggataaatgaagctcctgcaccaagcccatccgttaaaacagtcgcactagcaggagtattacctgtatttgttactgcaatcgtataggtaacgatatcgccaattgcagctgtcggtgtattcacagacttagtagcgacaatagtagcgttattaatttgagttgttattacgttacttaacgtattggcggatgctggaggtaagttaggatctacgacgtactggtacgttgtattgctttggttcgggagtggatttggattcgggatagaatttacttgtacttggaacgagatgagcgtatttgcattcggatttattggatcaatggcaattccacttgctggatttacattaggcagtgtattcccgtttacagtaacactattagcaataaatgatgtcccgtttggaattacatctgtaaatattacatttgatgcaagtgtgttcccgttattcgttaaagtagtcgtgtacgtaataatatcatttacgttagcaaactgtttatctgcagatttagtagcggcaattgaggcgttattaatagttgtctgtacagtgttagaagcaaccatctgcatcacagcaggtttggatggatcatacgtatattggaatgttgtgcctgattgatttgtaattggatttacagcagggatagttggtacaaaaacttggaatgcaacggtgcgtgatgaattcgctcctattgtaccaattgaaatgccggtagcaggatttgcgttagctacagggacattattaatcgttacagtattaggaatgaagagggtacccgctggaatgatatctgtaaacgttacattagcagcagggatattcccgttatttgttaaaatagtcgcatatagtatgacatcaccaacatcagcgaagtttgtactcgttagttttgtagcaacgatattagcagtattaatttgtgtagttactatattgctagcagcgtttctaacaagagcaggtaaatttggatcagcgataaagctatattgaagtgaagcgctgttttgaattgggtttggtgaaggtagcccatttgcacttatttgaaaaacaatcgttgtaaaaccacctgaaggaatggagccgacttgaagaccggtactagggtctgcacctagttgtaaagcaccacctataaaaatactatttggtacgattgtggtgccattagggattatatcggtaaaaataacattatttgctatagtatttccaagattagctaaagaaattgtatatgtgattggttgcccgacatcggcgatagttaaatctacttctttgacaatcactacatttgctaaattaatttgtgtacttacagtgttacttacagatgtttctacagttggtggatcgcccggatttagaataaaactatactgtgtactagatgaatttatcgttgggttttgtattggtaaagaggtgacggttacttgataagagacggtaagtgagccgttagcagcaatggaaggtagtggaacacctatatttggatctgcgttattttggagtacaccattaataagaaaagtgtttggaataaaggtagtaccgtctggattcgtatctacgaaagtaggactatcagcagaaacacttcctgcattcgtcaaagtagcagtataagttaatatatcccctacggtagcgaacgctcgatccactgttttggctgaaatgacatttgcatcgtttacttgagtaaatgtagtggttgaagtagtgttcttacttacaggtgaagcgtttggatcaacaataaagttataggagatggaagcgctatttgaaatagggtttggatttggaatgctagttattactacttggaatgaagctgtaattgtagtattagcattgatgctaccaatattgatgctagttggtgtaacgcctggttgagtaacaccgttaactataacgctatttggtacaaaggcggttccattcgcaattgaatcggatagtaatacattgttcgctgcaacattcccatcgttagtaagagcgaaggtgtaagttaatacatcgccaacttccgcaaacgttttatctacagatttattagcatggagatttgctagtctaattgttgatgtaacagaattagaatttgctgtctttgaagtcggtggcaaatttggatttacagtatatagataagaagcgaaggcattattaatgataggattttgggtcgtaatattgatgactgttacttggaaagaaagggtaaaagtagccccgccaggaattgtgccgataggtaaagcgacgagagaatctacattttgcaaaactccgtttagtgttacagtaccaggagttaatatcgttccatttggaagtgggtctgttagttgaacgctattagcggccgcatttccactgtttgtaataagaattgtataacttatcgtttcgccaattgtggcaaattgtttgttagttgattttgttaatgttacattcgcattgttaatttgagtggaaacgagattagaagaaatgttttttgtaacgggtgattggctagggttgacggtatattgataagaagcacttgatccgttagatacgacatttgacgcgggtattgtatttactactacttgaaatgcaacattttttgttgtgccgcttgggatggatccaatattcacgccgttagcgggatttgcgcccacttgtgtcgtgccatctattgttaaactgtttagaacgaaagttgttccagtagggatgacatctgtaaaaataacattgttcgcatttgtattacctgtagctgtaaaggaaacggtgtacgttagtgtatcaccaatatctgcaaaatttttatctactgctttcgtcattgttacagtagcattattcacttgagtggagacaatatttgtcttatcagtcccacttactgctggttgattaggtacaggaatgtattgatatgttgttgttccactatttaatattgggtttgtttgagggatagaaggaacgagtacttggaatgaaatagtagtagtggaatttgcggcaattgacccaattgatataccattagcgggatttgctccagcttgagtaactccgttcacagttacactccctggaatgaaagtagtcccgctaggaatcggatccgtatatatcacattcgttgcagcgatatttcctatattagctaaggcaatactgtaagttaatgtttcaccaatatcggtaaaaagtttgttaactgattttgttccattaatatctgcgaggttaatttgtgttccagcagagttgcttgttgcaagaccattaaaagttgttcctccggcgattggtgtatattgaaatgtaatattagcagtgttagagataggattttgacttggaagagaaacgacagtagcttggaaagttactgtacgagaagcaccattattaattgttccaagagatataccagccgcaggatttgcatttgtttgcggtacgttatctactgttacagtgccgggtataaaagaagtaccgctagggagactatctataaaaatagcgttattggcaggaagaagcccggtgttagggatagtaactgtataagtgagaatatctccaattgcagcaacacttttattcacgcttttcgtcgcttgtatatttggtgagtttatattaatttgtaagcctactgtatttaacatatatgcgtccccgttagtagttaaacggattgcggcggatacttgtgagtttgttaaataaggagaaatatcaatggaagtaatgtcccagccctgtcttcctgcggagatgtttgtacttgtagaagcactttgatttcgcgttccgaatgtccctgttgtatctaagtttcctgcagca
